(19) United States
(12) Patent Application Publication
(10) Pub. No.: US 2025/0064933 A1
(43) Pub. Date: Feb. 27, 2025

(54) CHIMERIC ANTIGEN RECEPTORS COMPRISING A PDZ BINDING MOTIF

(71) Applicant: St. Jude Children's Research Hospital, Inc., Memphis, TN (US)

(72) Inventors: Stephen GOTTSCHALK, Germantown, TN (US); Peter CHOCKLEY, Memphis, TN (US)

(73) Assignee: St. Jude Children's Research Hospital, Inc., Memphis, TN (US)

(21) Appl. No.: 18/724,820

(22) PCT Filed: Dec. 29, 2022
(86) PCT No.: PCT/US2022/082516

§ 371 Date: Jun. 27, 2024

Related U.S. Application Data
(60) Provisional application No. 63/294,873, filed on Dec. 30, 2021.

(51) Int. Cl. A61K 39/00; A61P 35/00; C07K 14/725; C07K 16/30

(52) U.S. Cl. CPC A61K 39/4644; A61K 39/4611; A61K 39/4613; A61K 39/4631; A61P 35/00; C07K 14/7051; C07K 16/30; C07K 2317/622; C07K 2319/03

(57) ABSTRACT

The present application provides chimeric antigen receptors (CARs) comprising an anchoring domain, such as a PDZ binding motif, which binds to a cell polarity protein. Also provided are poly nucleotides encoding the CARs, vectors, and cell compositions comprising the same. Pharmaceutical compositions comprising the polypeptides, polynucleotides, vectors, or cells of the present disclosure, and their uses in treating a disease in a subject are also provided.

### CROSS-REFERENCE TO RELATED APPLICATIONS

[0001] This application claims priority to U.S. Provisional Application No. 63/294,873, filed Dec. 30, 2021, the disclosure of which is herein incorporated by reference in its entirety.

### FIELD OF THE INVENTION

[0002] The present application relates to chimeric antigen receptors (CARs) comprising an anchoring domain, such as a PDZ binding motif, which binds to a cell polarity protein.

### BACKGROUND

[0003] Chimeric antigen receptor (CAR) technologies have been clinically implemented for the treatment of hematological malignancies; however, solid tumors remain resilient to CAR therapeutics¹⁻³. CAR technology has produced exceptionally powerful and effective signaling in both Natural Killer (NK) and T cells⁷. However, CAR:Antigen complexes form disordered synapses⁸, which do not consist of bona fide central, peripheral, or distal supramolecular activation complexes (SMACs) in contrast to canonical T cell Receptor to Human Leukocyte Antigen (TCR:HLA) synapses⁸. These organized SMACs allow for a lower threshold for antigen recognition by at least 3 logs⁹. Further, the additional signaling molecules recruited to the synapse increase the efficiency of signaling and exclude inhibitory phosphatases¹⁰. In contrast, the disjointed CAR synapse is a punctate structure with islands of CAR:Antigen complexes^{9,11}. These islands are, putatively, open to dephosphorylation and thus require a larger number of interactions to initiate downstream signaling and activate T cells.

### SUMMARY OF THE INVENTION

[0004] As specified in the Background section above, there is a great need in the art for synaptic modulation to an increasingly ordered state, e.g., via synapse tuning, to enhance efficacy and effectiveness of CARs. The present application addresses these and other needs.

[0005] In one aspect, the present invention provides a polynucleotide encoding a chimeric antigen receptor (CAR) which may comprise: a) an extracellular domain; b) a transmembrane domain; and, c) cytoplasmic domain comprising a signaling domain and an anchoring domain which binds to a cell polarity protein.

[0006] In some embodiments, the cell polarity protein may comprise a Postsynaptic density-95, Discs large, and Zona occludens 1 (PDZ) domain. In some embodiments, the anchoring domain may comprise a PDZ binding motif (PDZbm).

[0007] In some embodiments, the PDZbm may bind to a PDZ domain-containing protein selected from AAG12, AHNAK, AHNAK2, AIP1, ALP, APBA1, APBA2, APBA3, ARHGAP21, ARHGAP23, ARHGEF11, ARHGEF12, CARD10, CARD11, CARD14, CASK, CLP-36, CNKSR2, CNKSR3, CRTAM, DFNB31, DLG1, DLG2, DLG3, DLG4, DLG5, DVL1, DVL1L1, DVL2, DVL3, ERBB2IP, FRMPD1, FRMPD2, FRMPD2L1, FRMPD3, FRMPD4, GIPC1, GIPC2, GIPC3, GOPC, GRASP, GRIP1, GRIP2, HTRA1, HTRA2, HTRA3, HTRA4, IL16, INADL, KIAA1849, LDB3, LIMK1, LIMK2, LIN7A, LIN7B, LIN7C, LMO7, LNX1, LNX2, LRRC7, MAGI1, MAGI2, MAGI3, MAGIX, MAST1, MAST2, MAST3, MAST4, MCSP, MLLT4, MPDZ, MPP1, MPP2, MPP3, MPP4, MPP5, MPP6, MPP7, MYO18A, NHERF1, NOS1, PARD3, PARD6A, PARD6B, PARD6G, PDLIM1, PDLIM2, PDLIM3, PDLIM4, PDLIM5, PDLIM7, PDZD11, PDZD2, PDZD3, PDZD4, PDZD5A, PDZD7, PDZD8, PDZK1, PDZRN3, PDZRN4, PICK1, PPP1R9A, PPP1R9B, PREX1, PRX, PSCDBP, PTPN13, PTPN3, PTPN4, RAPGEF2, RGS12, RGS3, RHPN1, RIL, RIMS1, RIMS2, SCN5A, SCRIB (or Scribble), SDCBP, SDCBP2, SHANK1, SHANK2, SHANK3, SHROOM2, SHROOM3, SHROOM4, SIPA1, SIPA1L1, SIPA1L2, SIPA1L3, SLC9A3R1, SLC9A3R2, SNTA1, SNTB1, SNTB2, SNTG1, SNTG2, SNX27, SPAL2, STXBP4, SYNJ2BP, SYNPO2, SYNPO2L, TAX1BP3, TIAM1, TIAM2, TJP1, TJP2, TJP3, TRPC4, TRPC5, USH1C, and WHEN. In one embodiment, the PDZbm may bind to SCRIB (or Scribble).

[0008] In some embodiments, the PDZbm may be derived from any of the 16 classes of PDZ binding proteins as defined by the following C-terminal motifs: 1a (φ[K/R]XSDV); 1b (Ω[R/K]ET[S/T/R/K]φ); 1c (φφETXL); 1d (ETXV); 1e (TWΨ); 1f (≠ΩTWΨ); 1g (φφφ[T/S][T/S]ΩΨ); 1h (φφ[D/E][T/S]WΨ); 2a (FDΩΩC); 2b (WXΩFDV); 2c (WΩφDΨ); 2d (φφX[E/D]φφφ); 2e (φφφφ); 2f ([D/E]φΩφ); 3a (WΩ[S/T]DWΨ); 4a (ΩφGWF); φ, hydrophobic (V, I, L, F, W, Y, M); Ω, aromatic (F, W, and Y); Ψ, aliphatic (V, I, L, and M); and X, nonspecific. In one embodiment, the PDZbm may be derived from Cytotoxic and Regulatory T cell Associated Molecule (CRTAM).

[0009] In some embodiments, the PDZbm may comprise the amino acid sequence of ESIV (SEQ ID NO: 1). In some embodiments, the PDZbm may be encoded by the nucleotide sequence of gagagcatcgtg (SEQ ID NO: 2).

[0010] In some embodiments, the PDZbm may comprise the amino acid sequence of HPMRCMNYITKLYSEAKTKRKENVQHSKLEEKHIQVPESIV (SEQ ID NO: 3). In some embodiments, the PDZbm may be encoded by the nucleotide sequence of caccccatgoggtgcatgaactacatcaccaagctgtactccgaggccaagaccaageggaaagagaacgtccagcacagcaagc tggaagagaagcacattcaggtgcccgagagcatcgtgtga (SEQ ID NO: 4).

[0011] In some embodiments, the anchoring domain may be located at the C-terminal position of the CAR.

[0012] In some embodiments, the extracellular domain may comprise an antigen-binding moiety. In some embodiments, the antigen-binding moiety may be an antibody or antibody fragment. In some embodiments, the antigen-binding moiety may be a single chain variable fragment (scFv). In some embodiments, the antigen-binding moiety may be a ligand or peptide sequence. In some embodiments, the antigen-binding moiety may bind to a tumor antigen, antigen of extracellular matrix, antigen present on cells within the tumor microenvironment, tissue-specific antigen, autoimmune antigen or infectious antigen. In some embodiments, the antigen-binding moiety binds EphA2 or B7-H3.

[0013] In some embodiments, the transmembrane domain may be derived from CD8α, CD28, CD8, CD4, CD3ζ, CD40, CD134 (OX-40), NKG2A/C/D/E, or CD7. In some embodiments, the transmembrane domain may be derived from CD28.

[0014] In some embodiments, the extracellular domain may further comprise a hinge domain between the antigen-binding moiety and the transmembrane domain. In some embodiments, the hinge domain may be derived from CD8α stalk, CD28 or an IgG. In some embodiments, the hinge domain may be a short hinge domain derived from IgG1, IgG2, IgG3, or IgG4.

[0015] In some embodiments, the signaling domain may be derived from CD3ζ, DAP10, DAP12, Fc epsilon receptor I γ chain (FCER1G), CD3δ, CD3ε, CD3γ, CD226, NKG2D, or CD79A. In some embodiments, the signaling domain may be derived from CD3ζ.

[0016] In some embodiments, the cytoplasmic domain may further comprise one or more costimulatory domains. In some embodiments, the one or more costimulatory domains may be derived from CD28, 4-1BB, CD27, CD40, CD134, CD226, CD79A, ICOS, or MyD88, or any combination thereof. In some embodiments, the cytoplasmic domain may comprise a CD28 costimulatory domain.

[0017] In some embodiments, the extracellular target-binding domain may further comprise a leader sequence. In some embodiments, the leader sequence may be derived from CD8α or human immunoglobulin heavy chain variable region.

[0018] In some embodiments, the polynucleotide of the present disclosure may be a DNA molecule.

[0019] In some embodiments, the polynucleotide of the present disclosure may be an RNA molecule.

[0020] In some embodiments, the polynucleotide may be expressed in an inducible fashion, achieved with an inducible promoter, an inducible expression system, an artificial signaling circuit, and/or drug induced splicing.

[0021] In some embodiments, the promoter may be a T cell-specific promoter or an NK cell-specific promoter.

[0022] In some embodiments, the polynucleotide of the present disclosure may further comprise one or more additional nucleotide sequences encoding one or more additional polypeptide sequences. In some embodiments, the one or more additional polypeptide sequences may be selected from one or more cellular markers, epitope tags, cytokines, safety switches, dimerization moieties, or degradation moieties.

[0023] In another aspect, the present invention provides a chimeric antigen receptor (CAR) encoded by any of the polynucleotides disclosed herein. In some embodiments, the CAR may further comprise one or more additional polypeptide sequences. In some embodiments, the one or more additional polypeptide sequences may be selected from one or more cellular markers, epitope tags, cytokines, safety switches, dimerization moieties, or degradation moieties.

[0024] In another aspect, the present invention provides a recombinant vector which may comprise any of the polynucleotides disclosed herein. In some embodiments, the vector may be a viral vector. In some embodiments, the viral vector may be a retroviral vector, a lentiviral vector, an adenoviral vector, an adeno-associated virus vector, an alphaviral vector, a herpes virus vector, a baculoviral vector, or a vaccinia virus vector. In some embodiments, the viral vector may be a lentiviral vector.

[0025] In some embodiments, the vector may be a non-viral vector. In some embodiments, the non-viral vector may be a minicircle plasmid, a Sleeping Beauty transposon, a piggyBac transposon, or a single or double stranded DNA molecule that is used as a template for homology directed repair (HDR) based gene editing.

[0026] In another aspect, the present invention provides an isolated host cell which may comprise any of the polynucleotides disclosed herein or any of the recombinant vectors disclosed herein.

[0027] In another aspect, the present invention provides an isolated host cell which may comprise a chimeric antigen receptor (CAR) encoded by any of the polynucleotides of the present disclosure.

[0028] In some embodiments, the host cell may be an immune cell. In some embodiments, the host cell may be a nature killer (NK) cell, T cell, or macrophage. In some embodiments, the host cell may be a natural killer (NK) cell derived from peripheral, cord blood, IPSCs, and/or a cell line (e.g., NK-92 cells). In some embodiments, the host cell may be a T cell. In some embodiments, the host cell may be a CD8+ T-cell, a CD4+ T-cell, a cytotoxic T-cell, an αβ T-cell receptor (TCR) T-cell, an invariant natural killer T (INKT) cell, a γδ T-cell, a memory T-cell, a memory stem T-cell (TSCM), a naïve T-cell, an effector T-cell, a T-helper cell, or a regulatory T-cell (Treg). In some embodiments, the isolated host cell disclosed herein may be an immune cell which is derived from an induced pluripotent stem (IPS) cell.

[0029] In some embodiments, any of the isolated host cells disclosed herein may be further genetically modified to enhance its function by expressing one or more additional genes (e.g., transcription factors (e.g. c-Jun) or cytokines (e.g. IL-15); or deleting one or more inhibitory genes (e.g. cytokine inducible SH2 containing protein (CISH), DNA (cytosine-5)-methyltransferase 3A (DNMT3A)) with a gene editing technology (e.g., CRISPR-Cas9, base editors, or transcription activator-like effector nucleases (TALENs)).

[0030] In some embodiments, the host cell may be activated and/or expanded ex vivo.

[0031] In some embodiments, the host cell may be an allogeneic cell.

[0032] In some embodiments, the host cell may be an autologous cell.

[0033] In some embodiments, the host cell may be derived from a blood, marrow, tissue, or a tumor sample.

[0034] In another aspect, the present invention provides a pharmaceutical composition which may comprise an isolated host cell disclosed herein and a pharmaceutically acceptable carrier and/or excipient.

[0035] In another aspect, the present invention provides a method of generating an isolated host cell disclosed herein, said method comprising genetically modifying the host cell with any of the polynucleotides of the present disclosure or of the recombinant vectors of the present disclosure. In some embodiments, the genetic modifying step may be conducted via viral gene delivery. In some embodiments, the genetic modifying step may be conducted via non-viral gene delivery. In some embodiments, the genetic modification may be conducted ex vivo.

[0036] In some embodiments, the method disclosed herein may further comprise activation and/or expansion of the host cell disclosed herein ex vivo before, after and/or during said genetic modification.

[0037] In another aspect, the present invention provides a method for treating a disease in a subject in need thereof, which may comprise administering to the subject a therapeutically effective amount of any of the host cell(s) of the present disclosure or of the pharmaceutical composition of the present disclosure. In some embodiments, the disease may be a cancer, autoimmune disease, or infectious disease. In some embodiments, treatment methods disclosed herein may comprise: a) isolating NK cells, T cells, or macrophages or from the subject; b) genetically modifying said NK cells, T cells, or macrophages ex vivo with any of the polynucleotides disclosed herein or the vectors disclosed herein; c) optionally, expanding and/or activating said NK cells, T cells, or macrophages before, after or during step (b); and d) introducing the genetically modified NK cells, T cells, or macrophages into the subject. In some embodiments, the subject may be human.

### BRIEF DESCRIPTION OF THE DRAWINGS

[0038] FIGS. 1A-1P illustrate that the PDZ binding moiety scaffolding anchor enhances CAR NK cell synapse formation. Chimeric antigen receptor design schemes comprising an antigen recognition domain (anti-ephrin type-A receptor 2 [EphA2] single chain variable fragments [scFv]), a short hinge domain IgG (SH), a transmembrane domain cluster of differentiation (CD) 28 (CD28TM), a CD28 co-stimulatory domain, a CD3ζ activation domain, a Postsynaptic density-95, Discs large, and Zona occludens 1 binding moiety (PDZbm) scaffolding anchor domain, and/or mutated PDZbm domain (FIG. 1A). An exemplary mechanism of action scheme for an enhanced synapse CAR (CAR.PDZ) is also shown (FIG. 1B). Quantification of synaptic area determined by actin immunolabeling, n=17 and 19, UN (untransduced); n=19 and 16, CAR Δ; n=76 and 44, CAR; n=12 and 83, CAR.PDZ with and without EphA2 respectively. Two-Way ANOVA mean±SEM shown of one donor (FIG. 1C). Phospho-Zap-70 (pZAP70) intensity quantification from FIG. 1I-1P. Two-Way ANOVA mean±SEM (standard error of the mean) shown. Cells are the same as in FIG. 1C (FIG. 1D). Lysosome-associated membrane glycoprotein 1 (Lamp1) intensity quantification from FIG. 1I-1P. Two-Way ANOVA mean±SEM shown. Cells are the same as in FIG. 1C (FIG. 1E). Confocal images as prepared in FIG. 1I-1P incubated for 60 minutes with NK cells in various groups quantified in FIGS. 1G-1H. Bars indicate 10 microns. Immunolabeling of Scribble, CD3ε, and filamentous actin (F-actin) (FIG. 1F). Scribble polarization and accumulation at the immune synapse (IS). CAR Δ; n=32, CAR; n=23, CAR.PDZmut: n=57, CAR.PDZ n=28 from two independent experiments, One-Way ANOVA mean±SEM shown of two donors (FIG. 1G). CD3ε co-localization with Scribble as determined by Pearson Correlation Coefficient. CAR Δ; n=33, CAR; n=48, CAR.PDZmut: n=29, CAR.PDZ n=61, One-Way ANOVA mean±SEM shown of one donor (FIG. 1H). Fluorescent confocal microscopy of NK cells with and without recombinant human EphA2 protein incubated for 30 minutes, bars indicate 10 microns; pZAP70, Lamp1, Actin. Dashed line in merged images delineate the approximate line scan quantization of the fluorescent signal depicted in the histograms to the right. Quantified single cell fluorescent data is plotted in FIG. 1C-1E (FIG. 1I-1P). Two-stage linear step-up procedure of Benjamini, Krieger and Yekutieli to correct for false discovery rate (FDR) in all cases.

[0039] FIGS. 2A-2H demonstrate that CAR.PDZ NK cells exhibit enhanced avidity and calcium flux upon cancer cell recognition. Single cell assessment of at least NK cell avidity to EphA2-positive A549 tumor cells; at least 100 cells for each independent experiment was analyzed. UN; n=3 CAR Δ; n=4, CAR; n=3, CAR.PDZ; n=4 donors, mean±SEM shown (FIG. 2A). Normalized fold change of CAR NK cell binding compared to untransduced NK cells from FIG. 2A. Arrowed line indicates the point of statistical difference at CAR.PDZ vs. CAR 4 and vs CAR at 548pN which continued to 1000pN. Two-Way ANOVA was used to determine statistical significance with Two-stage linear step-up procedure of Benjamini, Krieger and Yekutieli to correct for FDR; mean±SEM shown (FIG. 2B). Avidity score of CAR NK cells determined by plateau of One-Phase Decay analysis from FIG. 2A. One-Way ANOVA was used to determine statistical significance with Two-stage linear step-up procedure of Benjamini, Krieger and Yekutieli to correct for FDR. mean±SEM shown (FIG. 2C). Same experimental conditions as FIG. 2A except utilizing EphA2 deleted A549 cells (FIG. 2D). Same normalized fold change as described in FIG. 2C utilizing EphA2 deleted A549 cells (FIG. 2E). Representative single cell calcium flux analysis of NK cells interacting with A549 tumor cells over indicated time points. Tumor cells, NK cells, and calcium flux data are visualized. Bar indicates 10 microns (FIG. 2F). Fold Change Calcium flux quantification of NK cells with A549 tumor cells. UN; n=28, CAR Δ; n=35, CAR; n=44, CAR.PDZ; n=48. Two-Way ANOVA was used to determine statistical significance with Two-stage linear step-up procedure of Benjamini, Krieger and Yekutieli to correct for FDR q<0.001 *** at minute 1; 1st peak AUC analysis with unpaired Brown-Forsythe and Welch's ANOVA. mean±SEM shown of one donor (FIG. 2G). Fold Change Calcium flux quantification of NK cells with DIPG007 tumor cells. CAR Δ; n=30, CAR; n=19, CAR.PDZmut: n=26, CAR.PDZ n=43. Two-Way ANOVA was used to determine statistical significance with Two-stage linear step-up procedure of Benjamini, Krieger and Yekutieli to correct for FDR q<0.001 *** at minute 6; 1st peak AUC analysis with unpaired Brown-Forsythe and Welch's ANOVA. mean±SEM shown of one donor (FIG. 2H).

[0040] FIGS. 3A-3N show CAR.PDZ NK cells have enhanced and distinct cytokine production. Schematic overview of experimental conditions for secretomics analysis. Single cell secretomic analysis using an IsoLight machine depicting the polyfunctionality of NK cells after exposure to A549 target cells for 4-hours (FIG. 3A). Secretion frequency of selected cytokines from the 32 analyte IsoLight Chip. For each cytokine, bars in the graph representing UN, CAR Δ, CAR and CAR PDZ groups are shown from left to right. Two-Way ANOVA was used to determine statistical significance with Two-stage linear step-up procedure of Benjamini, Krieger and Yekutieli to correct for FDR. n=5 donors, mean±SEM shown (FIG. 3B). All CAR constructs produced significantly more cytokines on the 2-analyte level compared to UN. Two-Way ANOVA was used to determine statistical significance with Two-stage linear step-up procedure of Benjamini, Krieger and Yekutieli to correct for FDR. Statistical difference delineated by q<0.0001 ****. n=5 donors, mean±SEM shown (FIG. 3C). Polyfunctional Strength Index (PSI) of CAR-NK cells detailing cytokine categories of NK cells from FIG. 3B individual cytokines driving PSI variance as indicated in FIG. 3C. Two-Way ANOVA was used to determine statistical significance with Two-stage linear step-up procedure of Benjamini, Krieger and Yekutieli to correct for FDR. n=5 donors, mean±SEM shown. For each protein, bars in the graph representing UN, CAR Δ, CAR and CAR PDZ groups are shown from left to right. (FIG. 3D). Only the effector cytokine group was significantly different between CAR.PDZ and CAR or CAR Δ NK cells. Two-Way ANOVA was used to determine statistical significance with Two-stage linear step-up procedure of Benjamini, Krieger and Yekutieli to correct for FDR. n=5 donors, mean±SEM shown (FIG. 3E). tSNE plots of the secretomic analysis performed in FIGS. 2A-E. tSNE plots revealed distinct cytokine secretion profiles and patterns for each construct tested. These plots highlight the increased secretion frequency and quantity. Log transformed secretion value intensities are delineated. Dashed ellipses indicate groups of highest secretion. Grayscale spectra vary per cytokine from 0 to the highest value in each group, n=5 donors (FIGS. 3F-3N).

[0041] FIGS. 4A-4I show CAR.PDZ NK cells have enhanced cytolytic activity and invasive properties. Cytotoxicity assay scheme with A549 lung adenocarcinoma cell viability determined by a chromogenic MTS assay after 24-hour co-culture with NK cells (FIG. 4A). CAR vs CAR.PDZ NK cells: significant differences at all effector-to-target (E:T) ratios except for 5:1. All other comparisons are significantly different. Two-Way ANOVA was used to determine statistical significance with Two-stage linear step-up procedure of Benjamini, Krieger and Yekutieli to correct for FDR. Statistical difference delineated by q<0.05 *, q<0.01 **, n=3 donors, mean±SEM shown (FIG. 4B). CAR vs CAR.PDZ vs CAR.PDZmut NK cells: significant differences at all effector-to-target (E:T) ratios 2.5:1. Two-Way ANOVA was used to determine statistical significance with Two-stage linear step-up procedure of Benjamini, Krieger and Yekutieli to correct for FDR. n=3 donors, mean±SEM shown (FIG. 4C). UN, CAR Δ, CAR, CAR.PDZ NK cells with 10 micromolar PDZ blocking or control (CTRL) peptides. Technical triplicates with mean±SEM shown (FIG. 4D). Area between the curve analysis (shaded regions in FIG. 2D) for two independent experiments with unique donors normalized to untransduced (FIG. 4E). Representative images from a tumoroid droplet cytotoxicity assay 143b osteosarcoma cells in mCherry. Bars indicate 1 mm (FIG. 4F). Quantification of the resulting tumor reduction as determined by tumor area normalized to the 1-hour (hr) mark. CAR.PDZ vs CAR Δ NK cells: significant differences starting at 40 hrs of culture; CAR.PDZ vs. CAR NK cells: significant differences starting at 58 hrs of culture. Two-Way ANOVA was used to determine statistical significance with Two-stage linear step-up procedure of Benjamini, Krieger and Yekutieli to correct for FDR. Dashed lines indicate comparison groups and what hour they become statistically different at least q<0.05*. n=3 donors, mean±SEM shown (FIG. 4G). Representative images from a tumoroid droplet invasion assay showing NK cells. Co-cultures were imaged hourly for 2 days. Bars indicate 1 mm (FIG. 4H). NK cell invasion ratio represents the counted NK cells per mm2 and normalized to the 1-hour mark (FIG. 4I).

[0042] FIGS. 5A-5J demonstrate CAR.PDZ NK cells extend survival and eradicate solid tumors in vivo. A549 model timeline (FIG. 5A). 2×10⁶ A549 tumor cells were mixed in pure Matrigel and injected subcutaneously (s.c.) into the dorsal flank of male and female NSG mice. 14 days later mice were treated with a single 10×10⁶ intravenous (i.v.) injection of NK cells. Tumor Alone: n=10, UN: n=10, CAR Δ: n=15, CAR: n=15, CAR.PDZ: n=10 mice data merged from two-three independent experiments with unique donors (FIG. 5B). Kaplan-Meier curves of mice from FIG. 5A median survival rates for each group (days): Tumor Alone: 42, UN: 48.5, CAR Δ: 69, CAR: 64, CAR.PDZ: 80. Log-rank test was used to determine significance. Statistical difference delineated by p<0.05 * (FIG. 5C). LM7 locoregional model timeline (FIG. 5D). 1×10⁶ LM7.ffluc tumor cells were injected intraperitoneally (i.p.) into NSG mice. 7 days later mice were treated with a single 10×10⁶ i.p. dose of NK cells. Tumors were measured by bioluminescence imaging. Tumor Alone: n=10, UN: n=10, CAR Δ: n=10, CAR: n=10, CAR.PDZ: n=5 mice merged from two independent experiments with unique donors (FIG. 5E). Kaplan-Meier curves of mice from FIG. 5B median survival rates for each group (days): Tumor Alone: 47, UN: 56, CAR Δ: 66.5, CAR: 76, CAR.PDZ: undefined. Log-rank test was used to determine significance. Statistical difference delineated by p<0.05 *, <0.01 ** (FIG. 5F). 143b model timeline (FIG. 5G). 1×10⁶ 143b tumor cells were injected subcutaneously (s.c.) into the dorsal flank of NSG mice. 5 days later mice were treated with a single 10×10⁶ intravenous (i.v.) injection of NK cells. Tumor Alone: n=10, UN: n=10, EphA2 CARs: CAR Δ: n=5, CAR: n=5, CAR.PDZ: n=4. B7 Homolog 3 (B7-H3) CARs CAR Δ: n=4, CAR: n=5, CAR.PDZ: n=5 mice (FIG. 5H). Kaplan-Meier curves of EphA2 targeted CAR NK treated mice from FIG. 5H median survival rates (days): Tumor Alone: 28, UN: 28, CAR Δ: 30, CAR: 28, CAR.PDZ: 42. Log-rank test was used to determine significance. Statistical difference delineated by p<0.05 *, <0.01 ** (FIG. 5I). Kaplan-Meier curves of B7-H3 targeted CAR NK treated mice from FIG. 5H median survival rates (days): Tumor Alone: 28, UN: 28, CAR Δ: 26, CAR: 28, CAR.PDZ: 42. Log-rank test was used to determine significance. Statistical difference delineated by p<0.01 ** (FIG. 5J).

[0043] FIGS. 6A-6G demonstrate CAR.PDZ T cells extend survival and eradicate solid tumors in vivo. Example images of B7-H3 CAR and CAR.PDZ T cells, tumor cells, synapse, calcium flux (FIG. 6A). Immune synapse area quantification of B7-H3 CAR and CAR.PDZ T cells (n=10 and 16 cells) with Area Under the Curve (AUC) analysis with mean±SEM shown of one donor (FIG. 6B). Calcium flux quantification of B7-H3 CAR and CAR.PDZ T cells (n=14 and 28 cells) with Two-Way ANOVA was used to determine statistical significance with Two-stage linear step-up procedure of Benjamini, Krieger and Yekutieli to correct for FDR q<0.001 *** at minute 2; 1st peak AUC analysis with unpaired Student's t-Test with Welch's correction. mean±SEM shown of one donor (FIG. 6C). DIPG007 model timeline (FIG. 6D). 1×10⁶ DIPG007 tumor cells were injected intracranially (i.e.) into NSG mice. 7 days later mice were treated with 2×10⁶ intracranial (i.e.) injection of T cells. Tumor Alone: n=7, CAR Δ: n=10, CAR: n=9, CAR.PDZ: n=9 mice from two independent pooled experiments mean±SEM shown (FIG. 6E). Net AUC analysis of tumor burden with One-Way ANOVA was used to determine statistical significance with Two-stage linear step-up procedure of Benjamini, Krieger and Yekutieli to correct for FDR. mean±SEM shown (FIG. 6F). DIPG7c model timeline (FIG. 6G). 1.5×10⁵ DIPG7c tumor cells were injected intracranially (i.e.) into the striatum of male and female NSG mice. 7 days later mice were treated with 2×10⁶ intracranial (i.e.) injection of T cells. Each group of mice is n=5, one donor (FIG. 6H). Kaplan-Meier curves of mice from FIG. 1G median survival rates (days): Tumor Alone: 27, CAR Δ: 27, CAR: 48, CAR.PDZ: Undefined. Log-rank test was used to determine significance. Statistical difference delineated by p<0.01 ** (FIG. 6I). 143b model timeline (FIG. 6J). 1×10⁶ 143b tumor cells were injected subcutaneously (s.c.) into the dorsal flank of NSG mice. 7 days later mice were treated with 10×10⁶ intravenous (i.v.) injection of T cells. Tumor Alone: n=4, CAR: n=10, CAR.PDZ: n=9 mice merged from two unique donors. Two-stage linear step-up procedure of Benjamini, Krieger and Yekutieli to correct for FDR. Statistical difference delineated by q<0.0001 ****, mean±SEM shown (FIG. 6K). Kaplan-Meier curves of B7-H3 targeted CAR T treated mice from FIG. 6K median survival rates (days): Tumor Alone: 29, CAR Δ: 29, CAR: 28, CAR.PDZ: 41. Log-rank test was used to determine significance. Statistical difference delineated by p<0.001 *** (FIG. 6L).

[0044] FIGS. 7A-7C illustrate primary NK cell transduction efficiency. Representative flow cytometry histogram plots detailing surface CAR expression (FIG. 7A). Quantified flow cytometry data showing percent CAR positive NK cells of various donors. UN: n=9, CAR Δ: n=8, CAR: n=9, CAR.PDZ: n=6 donors, mean±SEM shown (FIG. 7B). Immunophenotype of NK cells via flow cytometry. n=4 donors, mean±SEM shown (FIG. 7C).

[0045] FIGS. 8A-8B show Scribble Polarization at 30 minutes. Confocal images as prepared in FIG. 1 incubated for 30 minutes with NK cells in various groups quantified in FIG. 8B. Bars indicate 10 microns. Immunolabeling of Scribble, CD3ε, and filamentous actin (F-actin) (FIG. 8A). Scribble polarization and accumulation at the immune synapse (IS). CAR Δ; n=13, CAR; n=7, CAR.PDZmut: n=14, CAR.PDZ n=9, One-Way ANOVA was used to determine statistical significance with Two-stage linear step-up procedure of Benjamini, Krieger, and Yekutieli to correct for FDR. mean±SEM shown of one donor (FIG. 8B).

[0046] FIG. 9 illustrates Wiskott/Aldrich syndrome protein (WASp) Polarization at 15 and 30 minutes. Confocal images as prepared in FIG. 1 incubated for 15 and 30 minutes with NK cells in various groups. Quantified WASp polarization and accumulation at the immune synapse (IS). CAR 4; n=34 and 25, CAR; n=42 and 25, CAR.PDZ n=19 and 39, for 15 and 30 minutes, respectively. Two-Way ANOVA was used to determine statistical significance with Two-stage linear step-up procedure of Benjamini, Krieger, and Yekutieli to correct for FDR. Statistical difference delineated by q<0.01 *, q<0.0001 ****; mean±SEM shown of one donor

[0047] FIG. 10 shows that live NK cell imaging reveals lysosomal condensing and enhanced synapse formation with increased calcium flux. Lysosomal coalescing from live cell imaging in FIG. 2G EphA2 targeting CARs UN; n=27, CAR Δ; n=48, CAR; n=44, CAR.PDZ; n=48 cells. Peak lysosome signal was measured from the first calcium flux peak in each condition. One-Way ANOVA was used to determine statistical significance with Two-stage linear step-up procedure of Benjamini, Krieger and Yekutieli to correct for FDR; mean±SEM shown of one donor

[0048] FIG. 1I shows LM7 Avidity assessment with EphA2 targeting CARs. Normalized fold change of CAR NK cell binding compared to untransduced NK cells. Arrowed lines indicate the point of statistical difference at CAR.PDZ vs. CAR Δ at 268pN, CAR.PDZ vs CAR at 343pN, CAR.PDZ vs CAR.PDZmut at 363pN which continued to 1000pN indicated by dashed arrow lines. The only exception to this significance was from 650 to 738pN for CAR.PDZ vs CAR.PDZmut. Two-Way ANOVA was used to determine statistical significance with Two-stage linear step-up procedure of Benjamini, Krieger and Yekutieli to correct for FDR; n=1-3 donors, mean±SEM shown

[0049] FIGS. 12A-12E depict B7-H3 CAR design with avidity, synapse, and calcium flux analyses. Chimeric antigen receptor design schemes showing antigen recognition domain (anti-B7-H3 scFv), hinge and transmembrane domains (CD8αH/TM), CD28 co-stimulatory domain, CD3ζ activation domain, and/or PDZbm scaffolding anchor domain (FIG. 12A). Example flow cytometry plot detailing B7-H3 CAR expression (FIG. 12B). Normalized fold change of CAR NK cell binding compared to untransduced NK cells. Bracketed line indicates the scale of statistical difference at CAR.PDZ vs. CAR Δ and CAR from 194 to 646pN for both comparisons except for 205-215pN. Two-Way ANOVA was used to determine statistical significance with Two-stage linear step-up procedure of Benjamini, Krieger and Yekutieli to correct for FDR; q<0.05 *, <0.001 ***, n=3 donors, mean±SEM shown (FIG. 12C). Immune synapse area quantification of B7-H3 CAR and CAR.PDZ NK cells (n=11 and 11 cells) Two-Way ANOVA was used to determine statistical significance with Uncorrected Fisher's LSD test p<0.05 * at minute 5 and 12 with area under the curve analysis (FIG. 12D). Calcium flux quantification of B7-H3 CAR and CAR.PDZ NK cells (n=15 and 14 cells) with Two-Way ANOVA was used to determine statistical significance with Uncorrected Fisher's LSD test p<0.05 * starting at minute 2; 1st peak AUC analysis with unpaired Student's t-Test, mean±SEM shown of one donor. (FIG. 12E)

[0050] FIGS. 13A-13C illustrate A549 and LM7 tumor rechallenge rejection. A549 tumor rechallenge timeline with identical initial cancer cell numbers. Indicated tumor volumes from palpable nodules overtime (FIG. 13A). Intravital imaging of LM7 rechallenge with identical initial cancer cell numbers in complete responder mice. Grayscale 1e6 to 1e7 of total photon flux (p/s) (FIG. 13B). Tumor flux values of weekly measurements (FIG. 13C).

[0051] FIGS. 14A-14F depict CAR T cell phenotyping and cytokine production. Chimeric antigen receptor design schemes showing antigen recognition domain (anti-B7-H3 scFv), hinge and transmembrane domains (CD8αH/TM), CD28 co-stimulatory domain, CD3ζ activation domain, and/or PDZbm scaffolding anchor domain (FIG. 14A). Transduction efficiencies of various CAR constructs in T cells CAR Δ; n=7, CAR; n=8, CAR.PDZ n=5 donors mean±SEM shown (FIG. 14B). CD4/8 T cell analysis post transduction at Day 5-6, n=4 donors mean±SEM shown (FIG. 14C). Immunophenotype of CD4 CAR T cells Day 5-6 and longitudinally Day 12-13, n=4 donors mean±SEM shown (FIG. 14D). Immunophenotype of CD8 CAR T cells Day 5-6 and longitudinally Day 12-13, n=4 donors mean±SEM shown (FIG. 14E). B7-H3 CAR T cells were co-cultured with A549, LM7, and 143b cancer cells lines at a 2:1 ratio for 24 hours for n=3 experiments. Supernatant was collected and multiplex cytokine assessment was performed. One-Way ANOVA was used to determine statistical significance with Two-stage linear step-up procedure of Benjamini, Krieger and Yekutieli to correct for FDR mean±SEM (FIG. 14F).

[0052] FIGS. 15A-15D show B7-H3 CAR T cell synapse and calcium flux analyses. Immune synapse area quantification of B7-H3 CAR and CAR.PDZ T cells (n=12 and 9 cells) co-cultured with LM7 cells with AUC analysis (FIG. 15A). Calcium flux quantification of B7-H3 CAR and CAR.PDZ T cell (n=16 and 22 cells) co-cultured with LM7 cells with Two-Way ANOVA was used to determine statistical significance with Uncorrected Fisher's LSD test p<0.0001 **** at minute 4; 1st peak AUC analysis. mean±SEM shown of one donor (FIG. 15B). Calcium flux quantification of B7-H3 CAR and CAR.PDZ T cells (n=42 and 15 cells) co-cultured with U87 cells. Two-Way ANOVA was used to determine statistical significance with Uncorrected Fisher's LSD test p<0.0001 *** starting at minute 1; 1st peak AUC analysis with unpaired Student's t-Test. mean±SEM shown of one donor (FIG. 15C). Calcium flux quantification of B7-H3 CAR and CAR.PDZ T cells (n=22 and 31 cells) co-cultured with DIPG007 cells. Two-Way ANOVA was used to determine statistical significance with Uncorrected Fisher's LSD test p<0.0001 **** starting at minute 1; 1st peak AUC analysis with unpaired Student's t-Test. mean±SEM shown of one donor (FIG. 15D).

[0053] FIG. 16 shows B7-H3 expression on tumor cells. 143B, U87, LM7, DIPG7c, and DIPG007 tumor cells were analyzed for B7-H3 expression. Histograms indicate isotype controls and immunolabeled cells. Each sample is 100% positive and the indicated gMFI values are delineated.

[0054] FIG. 17 shows pERK quantification of stimulated CAR NK cells. CAR-NK cells were stimulated with rhEphA2 for indicated time points. BD PhosFlow kit was performed to manufacturer's instruction. Percent pERK positive CAR-NK cells are indicated, n=1.

[0055] FIGS. 18A-18C show nucleotide sequences and amino acid sequences for exemplary CARs of the present disclosure. Nucleotide sequence and amino acid sequences for an exemplary non-signaling CAR, comprising EphA2 scFv, short hinge, and CD28 transmembrane domains (FIG. 18A). Nucleotide sequence and amino acid sequences for an exemplary standard CAR, comprising EphA2 scFv, short hinge, CD28 transmembrane, CD28 costimulatory, and CD3ζ (CD3 zeta) activation domains (FIG. 18B). Nucleotide sequence and amino acid sequences for an exemplary PDZ CAR, comprising EphA2 scFv, short hinge, CD28 transmembrane, CD28 costimulatory, CD3ζ (CD3 zeta) domains, and PDZ binding motif (PFZbm) (FIG. 18C).

[0056] FIGS. 19A-19B show amino acid sequences (FIG. 19A) and nucleotide sequences (FIG. 19B) for an exemplary B7-H3 CAR PDZ construct described herein.

[0057] FIGS. 20A-20B show amino acid sequences (FIG. 20A) and nucleotide sequences (FIG. 20B) for an exemplary B7-H3 CAR construct described herein.

[0058] FIGS. 21A-21B show amino acid sequences (FIG. 21A) and nucleotide sequences (FIG. 21B) for an exemplary non-signaling B7-H3 CAR construct described herein.

### DETAILED DESCRIPTION

[0059] In various aspects, the present disclosure relates to methods for tuning CAR synapses in immune cells, for example, by adding an intracellular scaffolding protein binding site to the CAR, and compositions comprising the synapse-tuned CAR-modified cells. A PDZ binding motif (PDZbm), in particular, was employed that specifically binds Scribble⁴ resulting in additional scaffolding crosslinkings that enhance synapse formation and NK CAR cell polarization^{5,6}. Combined effects of this CAR design resulted in increased effector cell functionality in vitro and in vivo. T cells were utilized and similar global enhancements of in effector function were observed. By way of a non-limiting example, synapse-tuned CAR-NK cells exhibited amplified synaptic strength, number and abundance of secreted cytokines, enhanced killing of tumor cells, and prolonged survival with tumor clearance in two solid tumor models. Thus, synapse tuning may improve the efficacy of CAR-based cell therapeutics.

### Definitions

[0060] The term “chimeric antigen receptor” or “CAR” as used herein is defined as a cell-surface receptor comprising an extracellular target-binding domain, a transmembrane domain, and a cytoplasmic domain comprising a lymphocyte activation domain and optionally at least one co-stimulatory signaling domain, all in a combination that is not naturally found together on a single protein. This particularly includes receptors wherein the extracellular domain and the cytoplasmic domain are not naturally found together on a single receptor protein. The chimeric antigen receptors of the present disclosure can be used with lymphocyte such as T-cells and natural killer (NK) cells.

[0061] The term “cell polarity protein” refers to any of various proteins capable of regulating or modifying spatial differences in shape, structure, and/or function within a cell, e.g., a eukaryotic cell, including an immune cell. By way of a non-limiting example, such proteins may participate in synapse formation, migration, organization, and/or replication.

[0062] The terms “T cell” and “T lymphocyte” are interchangeable and used synonymously herein. As used herein, T-cell includes thymocytes, naive T lymphocytes, immature T lymphocytes, mature T lymphocytes, resting T lymphocytes, or activated T lymphocytes. A T-cell can be a T helper (Th) cell, for example a T helper 1 (Th1) or a T helper 2 (Th2) cell. The T-cell can be a helper T-cell (HTL; CD4+ T-cell) CD4+ T-cell, a cytotoxic T-cell (CTL; CD8+ T-cell), a tumor infiltrating cytotoxic T-cell (TIL; CD8+ T-cell), CD4+CD8+ T-cell, or any other subset of T-cells. Other illustrative populations of T-cells suitable for use in particular embodiments include naive T-cells and memory T-cells. Also included are “NKT cells”, which refer to a specialized population of T-cells that express a semi-invariant αβ T-cell receptor, but also express a variety of molecular markers that are typically associated with NK cells, such as NK1.1. NKT cells include NK1.1+ and NK1.1−, as well as CD4+, CD4−, CD8+ and CD8− cells. The TCR on NKT cells is unique in that it recognizes glycolipid antigens presented by the MHC I-like molecule CD Id. NKT cells can have either protective or deleterious effects due to their abilities to produce cytokines that promote either inflammation or immune tolerance. Also included are “gamma-delta T-cells (γδ T-cells),” which refer to a specialized population that to a small subset of T-cells possessing a distinct TCR on their surface, and unlike the majority of T-cells in which the TCR is composed of two glycoprotein chains designated α- and β-TCR chains, the TCR in γδ T-cells is made up of a γ-chain and a δ-chain. γδ T-cells can play a role in immunosurveillance and immunoregulation, and were found to be an important source of IL-17 and to induce robust CD8+ cytotoxic T-cell response. Also included are “regulatory T-cells” or “Tregs” refers to T-cells that suppress an abnormal or excessive immune response and play a role in immune tolerance. Tregs cells are typically transcription factor Foxp3-positive CD4+ T cells and can also include transcription factor Foxp3-negative regulatory T-cells that are IL-10-producing CD4+ T cells.

[0063] The terms “natural killer cell” and “NK cell” are used interchangeable and used synonymously herein. As used herein, NK cell refers to a differentiated lymphocyte with a CD 16+CD56+ and/or CD57+ TCR− phenotype. NKs are characterized by their ability to bind to and kill cells that fail to express “self” MHC/HLA antigens by the activation of specific cytolytic enzymes, the ability to kill tumor cells or other diseased cells that express a ligand for NK activating receptors, and the ability to release protein molecules called cytokines that stimulate or inhibit the immune response.

[0064] As used herein, the term “antigen” refers to any agent (e.g., protein, peptide, polysaccharide, glycoprotein, glycolipid, nucleic acid, portions thereof, or combinations thereof) molecule capable of being bound by a T-cell receptor. An antigen is also able to provoke an immune response. An example of an immune response may involve, without limitation, antibody production, or the activation of specific immunologically competent cells, or both. A skilled artisan will understand that an antigen need not be encoded by a “gene” at all. It is readily apparent that an antigen can be generated synthesized or can be derived from a biological sample or might be macromolecule besides a polypeptide. Such a biological sample can include, but is not limited to a tissue sample, a tumor sample, a cell or a fluid with other biological components, organisms, subunits of proteins/antigens, killed or inactivated whole cells or lysates.

[0065] The term “antigen-binding moiety” refers to a target-specific binding element that may be any ligand that binds to the antigen of interest or a polypeptide or fragment thereof, wherein the ligand is either naturally derived or synthetic. Examples of antigen-binding moieties include, but are not limited to, antibodies; polypeptides derived from antibodies, such as, for example, single chain variable fragments (scFv), Fab, Fab′, F(ab′)2, and Fv fragments; polypeptides derived from T-cell receptors, such as, for example, TCR variable domains; secreted factors (e.g., cytokines, growth factors) that can be artificially fused to signaling domains (e.g., “zytokines”); and any ligand or receptor fragment (e.g., CD27, NKG2D) that binds to the antigen of interest. Combinatorial libraries could also be used to identify peptides binding with high affinity to the therapeutic target.

[0066] Terms “antibody” and “antibodies” refer to monoclonal antibodies, multispecific antibodies, human antibodies, humanized antibodies, chimeric antibodies, single-chain Fvs (scFv), single chain antibodies, Fab fragments, F(ab′) fragments, disulfide-linked Fvs (sdFv), intrabodies, minibodies, diabodies and anti-idiotypic (anti-Id) antibodies (including, e.g., anti-Id antibodies to antigen specific TCR), and epitope-binding fragments of any of the above. The terms “antibody” and “antibodies” also refer to covalent diabodies such as those disclosed in U.S. Pat. Appl. Pub. 2007/0004909 and Ig-DARTS such as those disclosed in U.S. Pat. Appl. Pub. 2009/0060910. Antibodies useful as a TCR-binding molecule include immunoglobulin molecules and immunologically active fragments of immunoglobulin molecules, i.e., molecules that contain an antigen-binding site. Immunoglobulin molecules can be of any type (e.g., IgG, IgE, IgM, IgD, IgA and IgY), class (e.g., IgG1, IgG2, IgG3, IgG4, IgM1, IgM2, IgA1 and IgA2) or subclass.

[0067] The term “host cell” means any cell that contains a heterologous nucleic acid. The heterologous nucleic acid can be a vector (e.g., an expression vector). For example, a host cell can be a cell from any organism that is selected, modified, transformed, grown, used or manipulated in any way, for the production of a substance by the cell, for example the expression by the cell of a gene, a DNA or RNA sequence, a protein or an enzyme. An appropriate host may be determined. For example, the host cell may be selected based on the vector backbone and the desired result. By way of example, a plasmid or cosmid can be introduced into a prokaryote host cell for replication of several types of vectors. Bacterial cells such as, but not limited to DH5α, JM109, and KCB, SURE® Competent Cells, and SOLOPACK Gold Cells, can be used as host cells for vector replication and/or expression. Additionally, bacterial cells such as E. coli LE392 could be used as host cells for phage viruses. Eukaryotic cells that can be used as host cells include, but are not limited to yeast (e.g., YPH499, YPH500 and YPH501), insects and mammals. Examples of mammalian eukaryotic host cells for replication and/or expression of a vector include, but are not limited to, HeLa, NIH3T3, Jurkat, 293, COS, CHO, Saos, and PC12. In certain embodiments, the host cell is autologous. In certain embodiments, the host cell is allogenic.

[0068] Host cells of the present disclosure include T-cells and natural killer cells that contain the DNA or RNA sequences encoding the CAR and express the CAR on the cell surface. Such host cells may be used for enhancing T-cell activity, natural killer cell activity, treatment of tumors, and treatment of autoimmune disease.

[0069] The terms “activation” or “stimulation” means to induce a change in their biologic state by which the cells (e.g., T-cells and NK cells) express activation markers, produce cytokines, proliferate and/or become cytotoxic to target cells. All these changes can be produced by primary stimulatory signals. Co-stimulatory signals can amplify the magnitude of the primary signals and suppress cell death following initial stimulation resulting in a more durable activation state and thus a higher cytotoxic capacity. A “co-stimulatory signal” refers to a signal, which in combination with a primary signal, such as TCR/CD3 ligation, leads to T-cell and/or NK cell proliferation and/or upregulation or downregulation of key molecules.

[0070] The term “proliferation” refers to an increase in cell division, either symmetric or asymmetric division of cells. The term “expansion” refers to the outcome of cell division and cell death.

[0071] The term “differentiation” refers to a method of decreasing the potency or proliferation of a cell or moving the cell to a more developmentally restricted state.

[0072] The terms “express” and “expression” mean allowing or causing the information in a gene or DNA sequence to become produced, for example producing a protein by activating the cellular functions involved in transcription and translation of a corresponding gene or DNA sequence. A DNA sequence is expressed in or by a cell to form an “expression product” such as a protein. The expression product itself, e.g., the resulting protein, may also be said to be “expressed” by the cell. An expression product can be characterized as intracellular, extracellular or transmembrane.

[0073] The term “transfection” means the introduction of a “foreign” (i.e., extrinsic or extracellular) nucleic acid into a cell using recombinant DNA technology. The term “genetic modification” means the introduction of a “foreign” (i.e., extrinsic or extracellular) gene, DNA or RNA sequence to a host cell, so that the host cell will express the introduced gene or sequence to produce a desired substance, typically a protein or enzyme coded by the introduced gene or sequence. The introduced gene or sequence may also be called a “cloned” or “foreign” gene or sequence, may include regulatory or control sequences operably linked to polynucleotide encoding the chimeric antigen receptor, such as start, stop, promoter, signal, secretion, or other sequences used by a cell's genetic machinery. The gene or sequence may include nonfunctional sequences or sequences with no known function. A host cell that receives and expresses introduced DNA or RNA has been “genetically engineered.” The DNA or RNA introduced to a host cell can come from any source, including cells of the same genus or species as the host cell, or from a different genus or species.

[0074] The term “transduction” means the introduction of a foreign nucleic acid into a cell using a viral vector.

[0075] The terms “genetically modified” or “genetically engineered” refers to the addition of extra genetic material in the form of DNA or RNA into a cell.

[0076] As used herein, the term “derivative” or “variant” in the context of proteins or polypeptides (e.g., CAR constructs or domains thereof) refer to: (a) a polypeptide that has at least 40%, 45%, 50%, 55%, 60%, 65%, 70%, 75%, 80%, 85%, 90%, 95%, 98% or 99% sequence identity to the polypeptide it is a derivative or variant of; (b) a polypeptide encoded by a nucleotide sequence that has at least 40%, 45%, 50%, 55%, 60%, 65%, 70%, 75%, 80%, 85%, 90%, 95%, 98% or 99% sequence identity to a nucleotide sequence encoding the polypeptide it is a derivative or variant of; (c) a polypeptide that contains 1, 2, 3, 4, 5, 6, 7, 8, 9, 10, 11, 12, 13, 14, 15, 16, 17, 18, 19, 20 or more amino acid mutations (i.e., additions, deletions and/or substitutions) relative to the polypeptide it is a derivative or variant of; (d) a polypeptide encoded by nucleic acids can hybridize under high, moderate or typical stringency hybridization conditions to nucleic acids encoding the polypeptide it is a derivative or variant of; (e) a polypeptide encoded by a nucleotide sequence that can hybridize under high, moderate or typical stringency hybridization conditions to a nucleotide sequence encoding a fragment of the polypeptide, it is a derivative or variant of, of at least 20 contiguous amino acids, at least 30 contiguous amino acids, at least 40 contiguous amino acids, at least 50 contiguous amino acids, at least 75 contiguous amino acids, at least 100 contiguous amino acids, at least 125 contiguous amino acids, or at least 150 contiguous amino acids; or (f) a fragment of the polypeptide it is a derivative or variant of.

[0077] Percent sequence identity can be determined using any method known to one of skill in the art. In a specific embodiment, the percent identity is determined using the “Best Fit” or “Gap” program of the Sequence Analysis Software Package (Version 10; Genetics Computer Group, Inc., University of Wisconsin Biotechnology Center, Madison, Wisconsin). Information regarding hybridization conditions (e.g., high, moderate, and typical stringency conditions) have been described, see, e.g., U.S. Patent Application Publication No. US 2005/0048549 (e.g., paragraphs 72-73).

[0078] The terms “vector”, “cloning vector” and “expression vector” mean the vehicle by which a DNA or RNA sequence (e.g., a foreign gene) can be introduced into a host cell, so as to genetically modify the host and promote expression (e.g., transcription and translation) of the introduced sequence. Vectors include plasmids, synthesized RNA and DNA molecules, phages, viruses, etc. In certain embodiments, the vector is a viral vector such as, but not limited to, viral vector is an adenoviral, adeno-associated, alphaviral, herpes, lentiviral, retroviral, or vaccinia vector.

[0079] The term “regulatory element” refers to any cis-acting genetic element that controls some aspect of the expression of nucleic acid sequences. In some embodiments, the term “promoter” comprises essentially the minimal sequences required to initiate transcription. In some embodiments, the term “promoter” includes the sequences to start transcription, and in addition, also include sequences that can upregulate or downregulate transcription, commonly termed “enhancer elements” and “repressor elements”, respectively.

[0080] As used herein, the term “operatively linked” and similar phrases, when used in reference to nucleic acids or amino acids, refer to the operational linkage of nucleic acid sequences or amino acid sequence, respectively, placed in functional relationships with each other. For example, an operatively linked promoter, enhancer elements, open reading frame, 5′ and 3′ UTR, and terminator sequences result in the accurate production of a nucleic acid molecule (e.g., RNA). In some embodiments, operatively linked nucleic acid elements result in the transcription of an open reading frame and ultimately the production of a polypeptide (i.e., expression of the open reading frame). As another example, an operatively linked peptide is one in which the functional domains are placed with appropriate distance from each other to impart the intended function of each domain.

[0081] By “enhance” or “promote” or “increase” or “expand” or “improve” refers generally to the ability of a composition contemplated herein to produce, elicit, or cause a greater physiological response (i.e., downstream effects) compared to the response caused by either vehicle or a control molecule/composition. A measurable physiological response may include an increase in T-cell expansion, activation, effector function, persistence, and/or an increase in tumor cell death killing ability, among others apparent from the understanding in the art and the description herein. In certain embodiments, an “increased” or “enhanced” amount can be a “statistically significant” amount, and may include an increase that is 1.1, 1.2, 1.5, 2, 3, 4, 5, 6, 7, 8, 9, 10, 15, 20, 30 or more times (e.g., 500, 1000 times) (including all integers and decimal points in between and above 1, e.g., 1.5, 1.6, 1.7, 1.8, etc.) the response produced by vehicle or a control composition.

[0082] By “decrease” or “lower” or “lessen” or “reduce” or “abate” refers generally to the ability of composition contemplated herein to produce, elicit, or cause a lesser physiological response (i.e., downstream effects) compared to the response caused by either vehicle or a control molecule/composition. In certain embodiments, a “decrease” or “reduced” amount can be a “statistically significant” amount, and may include a decrease that is 1.1, 1.2, 1.5, 2, 3, 4, 5, 6, 7, 8, 9, 10, 15, 20, 30 or more times (e.g., 500, 1000 times) (including all integers and decimal points in between and above 1, e.g., 1.5, 1.6, 1.7, 1.8, etc.) the response (reference response) produced by vehicle, a control composition, or the response in a particular cell lineage.

[0083] The terms “treat” or “treatment” of a state, disorder or condition include: (1) preventing, delaying, or reducing the incidence and/or likelihood of the appearance of at least one clinical or sub-clinical symptom of the state, disorder or condition developing in a subject that may be afflicted with or predisposed to the state, disorder or condition, but does not yet experience or display clinical or subclinical symptoms of the state, disorder or condition; or (2) inhibiting the state, disorder or condition, i.e., arresting, reducing or delaying the development of the disease or a relapse thereof or at least one clinical or sub-clinical symptom thereof; or (3) relieving the disease, i.e., causing regression of the state, disorder or condition or at least one of its clinical or sub-clinical symptoms. The benefit to a subject to be treated is either statistically significant or at least perceptible to the patient or to the physician.

[0084] The term “effective” applied to dose or amount refers to that quantity of a compound or pharmaceutical composition that is sufficient to result in a desired activity upon administration to a subject in need thereof. Note that when a combination of active ingredients is administered, the effective amount of the combination may or may not include amounts of each ingredient that would have been effective if administered individually. The exact amount required will vary from subject to subject, depending on the species, age, and general condition of the subject, the severity of the condition being treated, the particular drug or drugs employed, the mode of administration, and the like.

[0085] The phrase “pharmaceutically acceptable”, as used in connection with compositions described herein, refers to molecular entities and other ingredients of such compositions that are physiologically tolerable and do not typically produce untoward reactions when administered to a mammal (e.g., a human). Preferably, the term “pharmaceutically acceptable” means approved by a regulatory agency of the Federal or a state government or listed in the U.S. Pharmacopeia or other generally recognized pharmacopeia for use in mammals, and more particularly in humans.

[0086] The term “protein” is used herein encompasses all kinds of naturally occurring and synthetic proteins, including protein fragments of all lengths, fusion proteins and modified proteins, including without limitation, glycoproteins, as well as all other types of modified proteins (e.g., proteins resulting from phosphorylation, acetylation, myristoylation, palmitoylation, glycosylation, oxidation, formylation, amidation, polyglutamylation, ADP-ribosylation, pegylation, biotinylation, etc.).

[0087] The terms “nucleic acid”, “nucleotide”, and “polynucleotide” encompass both DNA and RNA unless specified otherwise. By a “nucleic acid sequence” or “nucleotide sequence” is meant the nucleic acid sequence encoding an amino acid, the term may also refer to the nucleic acid sequence including the portion coding for any amino acids added as an artifact of cloning, including any amino acids coded for by linkers.

[0088] The terms “patient”, “individual”, “subject”, and “animal” are used interchangeably herein and refer to mammals, including, without limitation, human and veterinary animals (e.g., cats, dogs, cows, horses, sheep, pigs, etc.) and experimental animal models. In a preferred embodiment, the subject is a human.

[0089] The term “carrier” refers to a diluent, adjuvant, excipient, or vehicle with which the compound is administered. Such pharmaceutical carriers can be sterile liquids, such as water and oils, including those of petroleum, animal, vegetable or synthetic origin, such as peanut oil, soybean oil, mineral oil, sesame oil and the like. Water or aqueous solution saline solutions and aqueous dextrose and glycerol solutions are preferably employed as carriers, particularly for injectable solutions. Alternatively, the carrier can be a solid dosage form carrier, including but not limited to one or more of a binder (for compressed pills), a glidant, an encapsulating agent, a flavorant, and a colorant. Suitable pharmaceutical carriers are described in “Remington's Pharmaceutical Sciences” by E. W. Martin.

[0090] Singular forms “a”, “an”, and “the” include plural references unless the context clearly dictates otherwise. Thus, for example, a reference to “a method” includes one or more methods, and/or steps of the type described herein and/or which will become apparent to those persons skilled in the art upon reading this disclosure.

[0091] The term “about” or “approximately” includes being within a statistically meaningful range of a value. Such a range can be within an order of magnitude, preferably within 50%, more preferably within 20%, still more preferably within 10%, and even more preferably within 5% of a given value or range. The allowable variation encompassed by the term “about” or “approximately” depends on the particular system under study, and can be readily appreciated by one of ordinary skill in the art.

[0092] If aspects of the disclosure are described as “comprising” a feature, or versions there of (e.g., comprise), embodiments also are contemplated “consisting of” or “consisting essentially of” the feature.

[0093] The practice of the present disclosure employs, unless otherwise indicated, conventional techniques of statistical analysis, molecular biology (including recombinant techniques), microbiology, cell biology, and biochemistry, which are within the skill of the art. Such tools and techniques are described in detail in e.g., Sambrook et al. (2001) Molecular Cloning: A Laboratory Manual. 3rd ed. Cold Spring Harbor Laboratory Press: Cold Spring Harbor, New York; Ausubel et al. eds. (2005) Current Protocols in Molecular Biology. John Wiley and Sons, Inc.: Hoboken, NJ; Bonifacino et al. eds. (2005) Current Protocols in Cell Biology. John Wiley and Sons, Inc.: Hoboken, NJ; Coligan et al. eds. (2005) Current Protocols in Immunology, John Wiley and Sons, Inc.: Hoboken, NJ; Coico et al. eds. (2005) Current Protocols in Microbiology, John Wiley and Sons, Inc.: Hoboken, NJ; Coligan et al. eds. (2005) Current Protocols in Protein Science, John Wiley and Sons, Inc.: Hoboken, NJ; and Enna et al. eds. (2005) Current Protocols in Pharmacology, John Wiley and Sons, Inc.: Hoboken, NJ. Additional techniques are explained, e.g., in U.S. Pat. No. 7,912,698 and U.S. Patent Appl. Pub. Nos. 2011/0202322 and 2011/0307437.

[0094] The technology illustratively described herein suitably may be practiced in the absence of any element(s) not specifically disclosed herein.

[0095] The terms and expressions which have been employed are used as terms of description and not of limitation, and use of such terms and expressions do not exclude any equivalents of the features shown and described or portions thereof, and various modifications are possible within the scope of the technology claimed.

### Chimeric Antigen Receptors

[0096] In certain aspects, the present disclosure provides a polynucleotide encoding a CAR comprising: (a) an extracellular domain, (b) a transmembrane domain, and (c) a cytoplasmic domain comprising a signaling domain and an anchoring domain which binds to a cell polarity protein.

[0097] In some embodiments, the extracellular domain comprises an antigen-binding moiety, wherein the antigen-binding moiety may comprise, for example, an antibody or an antibody fragment. In some embodiments, the antigen-binding moiety may comprise a single chain variable fragment (scFv) such as, but not limited to, an EphA2 scFv or a B7-H3 scFv (see, e.g., FIGS. 18A-18C or, e.g., FIGS. 19A-19B, FIGS. 20A-20B, and FIGS. 21A-21B). In some embodiments, the antigen-binding moiety may comprise a ligand or peptide sequence. In some embodiments, the antigen-binding moiety may comprise a heavy chain variable region (VH) sequence, a light chain variable region (VL) sequence, and/or CDRs disclosed herein. In some embodiments, the antigen-binding moiety may comprise an scFv derived from an antibody or antibody fragment that binds to an antigen target disclosed herein. In some embodiments, the antigen-binding moiety may comprise an antigen-binding moiety derived from a CAR that binds to an antigen target. In some embodiments, the antigen-binding moiety may bind to a tumor antigen, antigen of extracellular matrix, antigen present on cells within the tumor microenvironment, tissue-specific antigen, autoimmune antigen or infectious antigen disclosed herein.

[0098] In some embodiments, the cell polarity protein may comprise a Postsynaptic density-95, Discs large, and Zona occludens 1 (PDZ) domain.

[0099] In some embodiments, the anchoring domain of any of various CARs of the present disclosure may comprise a PDZ binding motif (PDZbm). In some embodiments, when the CAR of the disclosure comprises a PDZbm, the CAR comprising said PDZbm may be referred to herein as a “PDZ CAR” or “CAR PDZ” or “CAR.PDZ”.

### Extracellular Domain

[0100] In certain aspects, CARs of the present disclosure comprise an extracellular domain, wherein the extracellular domain comprises an antigen-binding moiety.

[0101] The choice of antigen-binding moiety depends upon the type and number of antigens that define the surface of a target cell. For example, the antigen-binding moiety may be chosen to recognize an antigen that acts as a cell surface marker on target cells associated with a particular disease state. In certain embodiments, the CARs of the present disclosure can be genetically modified to target a tumor antigen of interest by way of engineering a desired antigen-binding moiety that specifically binds to an antigen (e.g., on a tumor cell). Non-limiting examples of cell surface markers that may act as targets for the antigen-binding moiety in the CAR of the disclosure include those associated with tumor cells, extracellular matrix, extracellular matrix, cells within the tumor microenvironment, specific tissues, autoimmune disease, and/or infectious diseases.

[0102] In some embodiments, the antigen-binding moiety may bind to a tumor antigen. In some embodiments, the antigen-binding moiety may bind to an antigen of extracellular matrix. In some embodiments, the antigen-binding moiety may bind to an antigen present on cells within the tumor microenvironment. In some embodiments, the antigen-binding moiety may bind to an antigen that is tissue specific. In some embodiments, the antigen-binding moiety may bind to an antigen that is tissue non-specific. In some embodiments, the antigen-binding moiety may bind to infectious antigen.

[0103] In certain embodiments, the antigen-binding moiety can be monomeric or multimeric (e.g., homodimeric or heterodimeric), or associated with multiple proteins in a non-covalent complex. In some embodiments, the antigen-binding moiety comprises an antigen-binding peptide, polypeptide or functional variant thereof that binds to an antigen.

[0104] In some embodiments, the antigen-binding moiety is an antibody or an antibody fragment that binds to an antigen. Antigen-binding moieties may comprise antibodies and/or antibody fragments such as monoclonal antibodies, multispecific antibodies, chimeric antibodies, single-chain Fvs (scFv), single chain antibodies, Fab fragments, F(ab′) fragments, disulfide-linked Fvs (sdFv), intrabodies, minibodies, single domain antibody variable domains, nanobodies (VHHs), diabodies and anti-idiotypic (anti-Id) antibodies (including, e.g., anti-Id antibodies to antigen specific TCR), and epitope-binding fragments of any of the above. Antibodies and/or antibody fragments may be derived from murine antibodies, rabbit antibodies, human antibodies, fully humanized antibodies, camelid antibody variable domains and humanized versions, shark antibody variable domains and humanized versions, and camelized antibody variable domains.

[0105] In some embodiments, the antigen-binding moiety may be a ligand. Non-limiting examples of CARs comprising an antigen-binding moiety that is a ligand include IL-13 mutein-CARs or CD27-CARs. In some embodiments, the antigen-binding moiety may be a peptide sequence. Non-limiting examples of CARs comprising an antigen-binding moiety that is a peptide sequence include chlorotoxin and GRP78-CARs. See, for example, PCT Patent Application WO/2021/216994, which is herein incorporated by reference in its entirety.

[0106] In some embodiments, the antigen-binding moiety binds to at least one tumor antigen. In some embodiments, the antigen-binding moiety binds to two or more tumor antigens. In some embodiments, the two or more tumor antigens are associated with the same tumor. In some embodiments, the two or more tumor antigens are associated with different tumors.

[0107] In some embodiments, the antigen-binding moiety binds to at least one antigen of extracellular matrix. In some embodiments, the antigen-binding moiety binds to two or more antigens of the extracellular matrix. In some embodiments, the two or more tumor antigens are associated with the same extracellular matrix. In some embodiments, the two or more tumor antigens are associated with different extracellular matrix.

[0108] In some embodiments, the antigen-binding moiety binds to at least one antigen present on cells within the tumor microenvironment. In some embodiments, the antigen-binding moiety binds to two or more antigens present on cells within the tumor microenvironment. In some embodiments, the two or more antigens are associated with the same cell. In some embodiments, the two or more tumor antigens are associated with different cells.

[0109] In some embodiments, the antigen-binding moiety binds to at least one autoimmune antigen. In some embodiments, the antigen-binding moiety binds to two or more autoimmune antigens. In some embodiments, the two or more autoimmune antigens are associated with the same autoimmune disease. In some embodiments, the two or more autoimmune antigens are associated with different autoimmune diseases.

[0110] In some embodiments, the antigen-binding moiety binds to at least one infectious antigen. In some embodiments, the antigen-binding moiety binds to two or more infectious antigens. In some embodiments, the two or more infectious antigens are associated with the same infectious disease. In some embodiments, the two or more infectious antigens are associated with different infectious diseases.

[0111] In some embodiments, the tumor antigen is associated with glioblastoma, ovarian cancer, cervical cancer, head and neck cancer, liver cancer, prostate cancer, pancreatic cancer, renal cell carcinoma, bladder cancer, or hematologic malignancy. Non-limiting examples of the tumor antigens associated with cervical cancer or head and neck cancer include MUC1, Mesothelin, HER2, GD2, and EGFR. Non-limiting examples of tumor antigens associated with ovarian cancer include FOLR1, FSHR, MUC16, MUC1, Mesothelin, CA125, EpCAM, EGFR, PDGFRα, Nectin-4, B7-H3 and B7-H4. Non-limiting examples of tumor antigens associated with hematological malignancies include BCMA, GPRC5D, SLAM F7, CD33, CD19, CD22, CD79, CLL1, CD123, and CD70. Non-limiting examples of tumor antigens associated with bladder cancer include Nectin-4 and SLITRK6. Non-limiting examples of tumor antigens associated with renal cancer include CD70 and FOLR1. Non-limiting examples of tumor antigen associated with glioblastoma include FGFR1, FGFR3, MET, CD70, ROBO1, IL13Rα2, HER2, EGFRVIII, EGFR, CD133, and PDGFRA. Non-limiting examples of tumor antigen associated with liver cancer include, EpCAM, cMET, AFP, Claudin 18.2, and GPC-3.

[0112] Additional examples of antigens that may be targeted by the antigen-binding moiety include, but are not limited to, alpha-fetoprotein, A3, antigen specific for A33 antibody, Ba 733, BrE3-antigen, carbonic anhydrase Ep-CAM, EphA1, EphA2, B7-H3, EphA3, EphA4, EphA5, EphA6, EphA7, EphA8, EphA10, EphB1, EphB2, EphB3, EphB4, EphB6, FIt-I, Flt-3, folate receptor, HLA-DR, human chorionic gonadotropin (HCG) and its subunits, hypoxia inducible factor (HIF-I), Ia, IL-2, IL-6, IL-8, insulin growth factor-1 (IGF-I), KC4-antigen, KS-1-antigen, KS1-4, Le-Y, macrophage inhibition factor (MIF), MAGE, MUC2, MUC3, MUC4, NCA66, NCA95, NCA90, EX, EGFR, EGP-I, EGP-2, antigen specific for PAM-4 antibody, placental growth factor, p53, prostatic acid phosphatase, PSA, PSMA, RS5, S100, CD1, CD1a, CD3, CD5, CD15, CD16, CD19, CD20, CD21, CD22, CD23, CD25, CD30, CD33, CD38, CD45, CD74, CD79a, CD80, CD123, CD138, colon-specific antigen-p (CSAp), CEA (CEACAM5), CEACAM6, CSAp, TAC, TAG-72, tenascin, VEGF, ED-B fibronectin, COL11A1, 17-1A-antigen, TRAIL receptors, Tn antigen, Thomson-Friedenreich antigens, tumor necrosis antigens, an oncogene marker, an oncogene product, or an angiogenesis marker.

[0113] In some embodiments, the antigen is associated with an autoimmune disease or disorder. Such antigens may be derived from cell receptors and cells which produce “self”-directed antibodies. In some embodiments, the antigen is associated with an autoimmune disease or disorder such as, psoriasis, vasculitis, Wegener's granulomatosis, Hashimoto's thyroiditis, Graves' disease, chronic inflammatory demyelinating polyneuropathy, Guillain-Barre syndrome, Crohn's disease, ulcerative colitis, Rheumatoid arthritis (RA), multiple sclerosis (MS), Sjögren's syndrome, Systemic lupus erythematosus, sarcoidosis, Type 1 diabetes mellitus, insulin dependent diabetes mellitus (IDDM), autoimmune thyroiditis, reactive arthritis, ankylosing spondylitis, scleroderma, polymyositis, dermatomyositis, or Myasthenia gravis.

[0114] In some embodiments, autoimmune antigens that may be targeted by the CAR disclosed herein include but are not limited to islet cell antigen, platelet antigens, Sm antigens in snRNPs, myelin protein antigen, Rheumatoid factor, and anticitrullinated protein, glucose-6-phosphate isomerase, receptors such as lipocortin 1, neutrophil nuclear proteins such as lactoferrin and 25-35 kD nuclear protein, granular proteins such as bactericidal permeability increasing protein (BPI), elastase fibrinogen, fibrin, vimentin, filaggrin, collagen I and II peptides, alpha-enolase, citrullinated proteins and peptides such as CCP-1, CCP-2 (cyclical citrullinated peptides), translation initiation factor 4G1, perinuclear factor, keratin, Sa (cytoskeletal protein vimentin), circulating serum proteins such as RFs (IgG, IgM), fibrinogen, plasminogen, components of articular cartilage such as collagen II, IX, and XI, ferritin, nuclear components such as RA33/hnRNP A2, Sm, stress proteins such as HSP-65, -70, -90, BiP, inflammatory/immune factors such as B7-H1, IL-1 alpha, and IL-8, enzymes such as calpastatin, alpha-enolase, eukaryotic translation elongation factor 1 alpha 1aldolase-A, dipeptidyl peptidase, osteopontin, cathepsin G, myeloperoxidase, proteinase 3, antigen, islet cell antigen, rheumatoid factor, histones, ribosomal P proteins platelet antigens, myelin protein, cardiolipin, vimentin, nucleic acids such as, and RNA, ribonuclear particles and proteins such as Sm antigens (including but not limited to SmD's and SmB′/B), U1RNP, A2/B1 hnRNP, Ro (SSA), and La (SSB) antigens, dsDNA, and ssDNA.

[0115] In some embodiments, the antigen targeted by CARs of the present disclosure is an antigen expressed in the tumor stroma. Exemplary antigens expressed in the tumor stroma that may be targeted by CARs of the present disclosure include but are not limited to oncofetal splice variants of fibronectin and tenascin C, tumor-specific splice variants of collagen, and fibroblast activating protein (FAP).

[0116] In some embodiments, the antigen targeted by CARs of the present disclosure is an antigen expressed on endothelial cell. Exemplary antigens expressed on endothelial cells that may be targeted by CARs of the present disclosure include, but are not limited to, VEGF receptors, and tumor endothelial markers (TEMs).

[0117] Exemplary infectious associated antigens that may be targeted by the modified host cells of the present disclosure include those derived from Adenoviridae (most adenoviruses); Arena viridae (hemorrhagic fever viruses); Birnaviridae; Bungaviridae (e.g., Hantaan viruses, bunga viruses, phleboviruses and Nairo viruses); Calciviridae (e.g., strains that cause gastroenteritis); Coronoviridae (e.g., coronaviruses); Filoviridae (e.g., ebola viruses); Flaviridae (e.g., dengue viruses, encephalitis viruses, yellow fever viruses); Hepadnaviridae (Hepatitis B virus; HBsAg); Herpesviridae (herpes simplex virus (HSV) 1 and 2, varicella zoster virus, cytomegalovirus (CMV), herpes virus); Iridoviridae (e.g., African swine fever virus); Norwalk and related viruses, and astroviruses; Orthomyxoviridae (e.g., influenza viruses); Papovaviridae (papilloma viruses, polyoma viruses); Paramyxoviridae (e.g., parainfluenza viruses, mumps virus, measles virus, respiratory syncytial virus); Parvovirida (parvoviruses); Picornaviridae (e.g., polio viruses, hepatitis A virus; enteroviruses, human Coxsackie viruses, rhinoviruses, echoviruses); Poxviridae (variola viruses, vaccinia viruses, pox viruses); Reoviridae (e.g., reoviruses, orbiviurses and rotaviruses); Retroviridae (e.g., human immunodeficiency viruses, such as HIV-1 (also referred to as HTLV-III, LAV or HTLV-III/LAV, or HIV-III); and other isolates, such as HIV-LP); Rhabdoviradae (e.g., vesicular stomatitis viruses, rabies viruses); Togaviridae (e.g., equine encephalitis viruses, rubella viruses); and unclassified viruses (e.g., the etiological agents of Spongiform encephalopathies, the agent of delta hepatitis, the agents of non-A, non-B hepatitis (i.e. Hepatitis C)).

[0118] Additional infectious antigens that may be targeted by the modified host cells of the present disclosure include bacterial antigens, fungal antigens, parasite antigens, or prion antigens, or the like. Non-limiting examples of infectious bacteria include but are not limited to: Actinomyces israelli, Bacillus antracis, Bacteroides sp., Borelia burgdorferi, Chlamydia., Clostridium perfringers, Clostridium tetani, Corynebacterium diphtheriae, Corynebacterium sp., Enterobacter aerogenes, Enterococcus sp., Erysipelothrix rhusiopathiae, Fusobacterium nucleatum, Haemophilus influenzae, Helicobacter pyloris, Klebsiella pneumoniae, Legionella pneumophilia, Leptospira, Listeria monocytogenes, Mycobacteria sps. (e.g., M tuberculosis, M avium, M gordonae, M intracellulare, M kansaii), Neisseria gonorrhoeae, Neisseria meningitidis, Pasteurella multocida, pathogenic Campylobacter sp., Rickettsia, Staphylococcus aureus, Streptobacillus monihformis, Streptococcus (anaerobic sps.), Streptococcus (viridans group), Streptococcus agalactiae (Group B Streptococcus), Streptococcus bovis, Streptococcus faecalis, Streptococcus pneumoniae, Streptococcus pyogenes (Group A Streptococcus), Treponema pallidium, and Treponema pertenue. Non-limiting examples of infectious fungi include: Cryptococcus neoformans, Histoplasma capsulatuin, Coccidioides immitis, Blastomyces dernatitidis, Chlamydia trachomatis and Candida albicans. Other infectious organisms (i.e., protists) include: Plasmodium such as Plasmodium falciparum, Plasmodium malariae, Plasmodium ovale, Plasmodium vivax, Toxoplasma gondii and Shistosoma. Other medically relevant microorganisms have been descried extensively in the literature, e.g., see C. G. A. Thomas, “Medical Microbiology”, Bailliere Tindall, Great Britain 1983, which is hereby incorporated by reference in its entirety.

[0119] Other examples of antigens that may be targeted by the modified host cells of the present disclosure include antigens expressed on immune and/or stem cells to deplete these cells such as CD45RA and c-kit.

[0120] Various non-limiting exemplary antigen targets are also displayed in Tables 1-3.

[0121] In some embodiments, the antigen-binding moiety may comprise a VH sequence, a VL sequence, and/or CDRs thereof, such as those described in the cited publications, the contents of each publication are incorporated herein by reference in their entirety for all purposes (Table 1).

TABLE 1
Exemplary antigen-binding moities comprising a VH sequence,
a VL sequence, and/or CDRs thereof

| Antigen target | Type | Examples of Source | Type | Examples of Source |
|---|---|---|---|---|
| Oncofetal | — | — | VL | Identifier 1, 2, 7 in |
| fibronectin | | | | US20070202103A1 |
| VMS2 | VH | FIG. 1 in | — | — |
| | | WO2000058363 | | |
| GCC1 | VH | Identifier 1 in | VL | Identifier 4, 2, in |
| | | US20160030595A1 | | US20160030595A1 |
| MVR | VH | Identifier 1 in | VL | Identifier 5 in |
| | | US20160257762A1 | | US20160257762A1 |
| OlfmB | VH | Identifier 1 in | VL | Identifier 2 in |
| | | WO2015054441A1 | | WO2015054441A1 |
| TRBC1 | VH | Identifier 1 in | VL | Identifier 2 in |
| | | WO2015132598 | | WO2015132598 |
| Malignant | VH | Identifier 1 in | VL | Identifier 5 in |
| Variable | | WO2015133817A1 | | WO2015133817A1 |
| Receptor | | | | |
| CD40 | VH | Identifier 1 in | VL | Identifier 2 in |
| | | WO2016069919; | | WO2016069919; |
| | | Identifier 5, 7, 8 in | | Identifier 6 in |
| | | WO2015091655 | | WO2015091655 |
| CDIM | VH | Identifier 1, 10, 11, | VL | Identifier 28, 29, |
| | | 12, 13, 14, 15, 16, | | 30, 31, 32, 33, 34, |
| | | 17, 18, 19, 2, 20, | | 35, 36, 37, 38, 39, |
| | | 21, 22, 3, 4, 5, 6, 7, | | 40, 41, 42, 43, 44, |
| | | 8, 9 in | | 45, 46, 47, 48, 49, |
| | | WO2013120012 | | in WO2013120012 |
| ILIRAP | VH | Identifier 1, 10, 19, | VL | Identifier 14, 15, 17, |
| | | 8, 9 in | | 18, 2, 20 in |
| | | WO2016020502; | | WO2016020502; |
| | | Identifier 120, 122, | | Identifier 121, 123, |
| | | 124 in | | 125 in |
| | | WO2016179319A1 | | WO2016179319A1 |
| ALK | VH | Identifier 1, 11, 13, | VL | Identifier 10, 12, 14, |
| | | 15, 3, 5, 7, 9 in | | 16, 2, 4, 6, 8 in |
| | | US20160280798A1; | | US20160280798A1; |
| | | Identifier 9, 1, 3, | | Identifier 10, 12, 14, |
| | | 5, 11, 13, 15, 7, 9 in | | 16, 8, in |
| | | WO2015069922 | | WO2015069922 |
| LHR | VH | Identifier 1, 2, 3, 4, | — | — |
| | | 5, 6, 7, 8 in | | |
| | | WO2016160618A3 | | |
| MUC16 | VH | Identifier 1, 21, 41, | VL | Identifier 2, 22, 42, |
| | | 81, 61 in | | 62, 82 in |
| | | WO2016149368; | | WO2016149368 |
| | | Identifier 11, 4, 6, | | |
| | | 8 in | | |
| | | US20130171152 | | |
| PTK7 | VH | Identifier 1, 25, 49 | VL | Identifier 20, 22, 24, |
| | | in US20150315293; | | 26, 28, 30, 32, 34, |
| | | Identifier 21, 23, 25, | | 36, 38, 40, 42, 44, |
| | | 27, 29, 31, 33, 35, | | 46, 48, 50, 52, 54, |
| | | 37, 39, 41, 43, 45, | | 56, 58, 60, 62, 64, |
| | | 47, 49, 51, 53, 55, | | 66, 68 in |
| | | 57, 59, 61, 63, 65, | | WO2012112943A1 |
| | | 67, 69 in | | Identifier 15, 39, 63 |
| | | WO2012112943A1 | | in US20150315293 |
| ANG2 | VH | Identifier 1, 3 in | VL | Identifier 2, 4 in |
| | | WO2015091655 | | WO2015091655 |
| CD71 | VH | Identifier 1, 3, 325, | VL | Identifier 2, 327, |
| | | 4, 5, 699, in | | 329, 331, 333, 335, |
| | | US20160355599 | | 337, 6, 650, 652, |
| | | | | 654, 656, 658, 660, |
| | | | | 670, 671, 672, 673, |
| | | | | 7, 701, 702, 703, |
| | | | | 704, 705, 706, 707, |
| | | | | 708, 709, 710, 711, |
| | | | | 712, 721, 722, 723, |
| | | | | 724, 725, 726, 727, |
| | | | | 728, 729, 730, 731, |
| | | | | 732, 733, 734, 735, |
| | | | | 736, 737, 738, 739, |
| | | | | 740, 741, 742, 743, |
| | | | | 744, 745, 746, 747, |
| | | | | 748, 749, 750, 751, |
| | | | | 752, 753, 754, 755, |
| | | | | 756, 757, 758, 759, |
| | | | | 760, 761, 762, 763, |
| | | | | 764, 765, 766, 767, |
| | | | | 768, 769, 770, 771, |
| | | | | 772, 773, 774, 775, |
| | | | | 776, 777, 778, 779, |
| | | | | 780, 781, 782, 783, |
| | | | | 784 785, 786, 787, |
| | | | | 788, 8, 810, 811, |
| | | | | 812, 813, 814, 815, |
| | | | | 816, 817, 818, 819, |
| | | | | 820, 821, 822, 823, |
| | | | | 824, 825, 826, 827, |
| | | | | 828, 829, 830, 831, |
| | | | | 832, 833, 834, 835, |
| | | | | 836, 810, 842, 843, |
| | | | | 844, 845, 846, 847, |
| | | | | 848, 849, 850, 851, |
| | | | | 852, 853, 854, 855, |
| | | | | 856, 857, 858, 859, |
| | | | | 860, 861, 862, 863, |
| | | | | 864, 865, 866, 867, |
| | | | | 868, 869, 870, 871, |
| | | | | 872, 873, 874, 875, |
| | | | | 876, 877, 879, 879, |
| | | | | 880, 881, 882, 883, |
| | | | | 884, 885, 886, 887, |
| | | | | 888, 889, 890, 891, |
| | | | | 892, 893, 894, 895, |
| | | | | 896, 897, 898, 899, |
| | | | | 900, 901, 902, 903, |
| | | | | 905, 906, 907, 908, |
| | | | | in US20160355599 |
| TEM8 | VH | Identifier 1, 3, 5, 7 in | VL | Identifier 4, 6, 8 in |
| | | US20160264662A1 | | US20160264662A1 |
| IGFI | VH | Identifier 1, 3, 7 in | VL | Identifier 2, 4, 6, 8 in |
| | | WO2007118214; | | WO2007118214; |
| | | Identifier 7 in | | |
| | | WO2015073575 | | |
| FAP | VH | Identifier 1, 5 in | VL | Identifier 2, 6 in |
| | | WO2015118030; | | WO2015118030; |
| | | Identifier 170, 172 in | | Identifier 171, 173 in |
| | | WO2016120216; | | WO2016120216; |
| | | Identifier 8 in | | Identifier 9 in |
| | | US20160326265 A1 | | US20160326265 A1 |
| Mesothelin | VH | Identifier 1, 6 in | VL | Identifier 3, 5 in |
| | | WO2015188141; | | WO2015188141; |
| | | Identifier 119, 50 in | | Identifier 1, 2, 3 in |
| | | US20160333114A1; | | WO2013142034; |
| | | Identifier 5, 6 in | | Identifier 11, 15, 19, |
| | | WO2013142034; | | 23, 27 in |
| | | Identifier 15, 2 in | | US20160229919A1 |
| | | US9416190B2; | | US9416190B2; |
| | | Identifier 13, 17, 21, | | Identifier 120, 47, 49 |
| | | 25, 29, 9 in | | in |
| | | US20160229919A1 | | US20160333114A1 |
| Frizzled | VH | Identifier 10 in | VL | Identifier 12, 14 in |
| Receptor | | WO2010037041 | | WO2010037041 |
| APCDD1 | VH | Identifier 10, 102, | VL | Identifier 136, 100, |
| | | 106, 110, 114, 118, | | 104, 108, 112, 116, |
| | | 122, 126, 130, 134, | | 12, 120, 124, 128, |
| | | 14, 6, 98 in | | 132, 16, 8 in |
| | | WO2012019061 | | WO2012019061 |
| CSF | VH | Identifier 10, 102, 14, | VL | Identifier 12, 32, 44, |
| | | 18, 2, 22, 26, 30, 34, | | 48, 60 in |
| | | 38, 46, 50, 54, 58, 6, | | US20050059113A1 |
| | | 62, 66, 70, 74, 78, | | |
| | | 82, 86, 90, 94, 98 in | | |
| | | US20050059113A1 | | |
| TIGIT | VH | Identifier 10, 11, 12, | VL | Identifieer 130, 131, |
| | | 124, 125, 126, 127, | | 132, 133, 137, 139, |
| | | 128, 129, 13, 136, | | 145, 146, 151, 152, |
| | | 138, 14, 143, 144, | | 25, 26, 27, 28, 29, |
| | | 149, 15, 150, 16, 17, | | 30, 50, 51, 52, 64, |
| | | 18, 19, 20, 21, 22, 23, | | 95, 8 in |
| | | 24, 37, 38, 39, 40, | | US20160355589 |
| | | 41, 42, 43, 44, 45, | | |
| | | 46, 47, 63, 94, 7, 9 | | |
| | | in US20160355589 | | |
| B7H3 | VH | Identifier 10, 11, 12, | VL | Identifier 1, 2, 3, 4, |
| | | 13, 14, 15, 16, 9 in | | 5, 6, 7, 8 in |
| | | WO2016033225 | | WO2016033225 |
| IL4R | VH | Identifier 10, 11, 14, | VL | Identifier 13, 7, 8 in |
| | | 15, 9 in | | WO2009121847 |
| | | WO2009121847 | | |
| Lymphotoxin | VH | Identifier 10, 12, 14, | VL | Identifier 1, 15, 4, |
| beta receptor | | 16, 2 in | | 6, 8 in |
| | | WO2004002431 | | WO2004002431 |
| LGR5 | VH | Identifier 10, 12, 16, | VL | Identifier 15, 19, 21, |
| | | 18, 20, 22, 24, 26, 4 | | 23, 25, 3 in |
| | | in US20160102146 | | US20160102146 |
| CD148 | VH | Identifier 10, 14, 18, | VL | Identifier 12, 16, 20, |
| | | 2, 22, 26, 30, 6 in | | 24, 28, 32, 4, 8 in |
| | | WO2005118643 | | WO2005118643 |
| GPC3 | VH | Identifier 10, 14, 2, 3, | VL | Identifier 10, 14, 18, |
| | | 4, 5, 6, 7, 8, 9 in | | 22, 24, 26 in |
| | | US20160208015 A1; | | US9409994B2; |
| | | Identifier 22 in | | Identifier 16, 31 in |
| | | WO2016049459; | | US20160208015A1; |
| | | Identifier 12, 16, 20, | | Identifier 23 in |
| | | 37, 8 in | | WO2016049459 |
| | | US9409994B2 | | |
| CSPG4 | VH | Identifier 10, 16, 18, | VL | Identifier 7 in |
| | | 4, 6, 8 in | | WO2016164429; |
| | | WO2016077638; | | Identifier 12, 14 in |
| | | Identifier 8 in | | WO2016077638 |
| | | WO2016164429 | | |
| AGR2 | VH | Identifier 10, 18 in | VL | Identifier 11, 19 in |
| | | WO2016040321 | | WO2016040321 |
| Tissue factor | VH | Identifier 10, 19, 23, | VL | Identifier 25. 31 in |
| | | 27, 29, 6 in | | US20040229301A1; |
| | | WO2004094475; | | Identifier 12, 21, 25, |
| | | Identifier 38 in | | 31, 8 in |
| | | US20160333114A1 | | WO2004094475; |
| | | | | Identifier 35, 37 in |
| | | | | US20160333114A1 |
| SEMA- | VH | Identifier 10, 25, 9 in | VL | Identifier 17, 18, 29 |
| PHORIN 4D | | US20160115240A1 | | in US20160115240A1 |
| PDL1 | VH | Identifier 10, 32, 8 in | VL | Identifier 22, 26, 34, |
| | | US20160319022; | | 42, 58, 66, 74, 82, 86 |
| | | Identifier 18, 30, 38, | | in WO2016061142; |
| | | 46, 50, 54, 62, 70, | | Identifier 30, 8, 9 in |
| | | 78 in | | US20150190506; |
| | | WO2016061142; | | Identifier 7, 9 in |
| | | Identifier 29, 7 in | | US20160319022; |
| | | US20150190506; | | Identifier 17, 22, 24, |
| | | Identifier 16, 18, | | 249, 26, 28, 309, 311, |
| | | 197, 247, 248, 250, | | 313, 320, 325, 34, 340, |
| | | 251, 252, 253, 254, | | 357, 359, 36, 42, 44, |
| | | 255, 256, 257, 258, | | 58, 60, 66, 68, 74, 76, |
| | | 259, 260, 30, 308, | | 8, 82, 84, 86, 88 in |
| | | 310, 312, 319, 32, | | US20160108123 |
| | | 324, 339, 356, 38, | | |
| | | 40, 46, 48, 50, 52, | | |
| | | 54, 6, 62, 70, 72, 78, | | |
| | | 80, 91, 96 in | | |
| | | US20160108123; | | |
| | | Identifier 358, 56, | | |
| | | 64 in | | |
| | | US20160108123 | | |
| HLAG | VH | Identifier 10, 8 in | VL | Identifier 18, 20 in |
| | | WO2016160622A2 | | WO2016160622A2 |
| B7H4 | VH | Identifier 100, 101, | VL | Identifier 104, 11, 126, |
| | | 102, 103, 107, 108, | | 134, 138, 19, 27, 3, |
| | | 109, 110, 111, 112, | | 35, 55, 93, 95, 97, 98, |
| | | 113, 114, 12, 127, | | 145, 146, 147, 148 in |
| | | 130, 131, 132, 133, | | US20160159910; |
| | | 137, 2, 20, 28, 36, | | Identifier 29, 31, 33 in |
| | | 37, 38, 4, 56, 99, | | WO2016160620 |
| | | 144 in | | |
| | | US201606159910; | | |
| | | Identifier 13, 15, 17 | | |
| | | in WO2016160620 | | |
| VEGFR2 | VH | Identifier 100, 101, | VL | Identifier 107, 108, |
| | | 102, 103, 114, 115, | | 109, 110, 111, 112, |
| | | 116, 117, 118, 119, | | 113, 86, 87, 88, 89, |
| | | 120, 121, 122, 123, | | 90, 91, 92, 93, 94 in |
| | | 124, 95, 96, 97, 98, | | WO2017004254 |
| | | 99 in | | |
| | | WO2017004254 | | |
| CD73 | VH | Identifier 100, 103, | VL | Identifier 12. 20, 44, |
| | | 107, 109, 112, 114, | | 72, 76, 8, 84, 92 in |
| | | 116, 119, 121, 16, | | US20160145350; |
| | | 32, 4, 52, 60, 68, 80, | | Identifier 22, 29, 37, |
| | | 88 in | | 4 in |
| | | US20160145350; | | WO2016055609A1; |
| | | Identifier 135, 40, 21, | | Identifier 101, 102, |
| | | 3, 28, 36 in | | 104, 106, 110, 117, |
| | | WO2016055609A1 | | 118, 120, 122 in |
| | | | | US20160145350 |
| Claudin | VH | Identifier 101, 103, | VL | Identifier 114, 116, |
| | | 105, 107, 109, 111, | | 118, 120, 22, 25, 29, |
| | | 113, 115, 117, 119, | | 33, 37, 41, 45, 49, 53, |
| | | 121, 122, 123, 124, | | 57, 61, 65, 69, 73, 77 |
| | | 125, 126, 127, 128, | | in WO2016073649A1 |
| | | 129, 130, 131, 132, | | |
| | | 133, 134, 135, 136, | | |
| | | 137, 138, 139, 140, | | |
| | | 141, 142, 143, 144, | | |
| | | 145, 146, 147, 148, | | |
| | | 149, 150, 23, 27, 31, | | |
| | | 35, 39, 43, 47, 51, 55, | | |
| | | 59, 63, 67, 71, 75, 79, | | |
| | | 81, 83, 85, 87, 89, 91, | | |
| | | 93, 95, 97, 99 in | | |
| | | WO2016073649A1 | | |
| CLL3 | VH | Identifier 101, 103, | VL | Identifier 100, 102, |
| | | 105, 107, 109, 111, | | 104, 106, 108, 110, |
| | | 113, 115, 117, 119, | | 112, 114, 116, 118, |
| | | 121, 123, 125, 127, | | 120, 122, 124, 126, |
| | | 129, 131, 133, 135, | | 128, 130, 132, 134, |
| | | 137, 139, 141, 145, | | 136, 138, 140, 144, |
| | | 147, 149, 151, 153, | | 146, 148, 150, 152, |
| | | 155, 157, 159, 161, | | 154, 156, 158, 160, |
| | | 163, 165, 167, 169, | | 162, 164, 166, 170, |
| | | 171, 173, 175, 177, | | 172, 174, 176, 178, |
| | | 179, 181, 183, 185, | | 180, 182, 184, 186, |
| | | 187, 191, 193, 195, | | 190, 192, 194, 196, |
| | | 197, 199, 201, 203, | | 198, 20, 200, 202, |
| | | 205, 207, 209, 21, | | 204, 206, 208, 210, |
| | | 211, 213, 23, 25, 27, | | 212, 22, 24, 26, 28, |
| | | 29, 31, 33, 35, 37, 39, | | 30, 32, 34, 36, 38, 40, |
| | | 41, 43, 45, 47, 49, 51, | | 42, 44, 46, 48, 50, 54, |
| | | 53, 55, 57, 59, 61, 63, | | 56, 58, 60, 62, 64, 66, |
| | | 65, 67, 69, 71, 73, 75, | | 68, 70, 72, 74, 76, 78, |
| | | 77, 79, 81, 83, 85, 87, | | 80, 82, 84, 86, 88, 90, |
| | | 89, 91, 93, 95, 97, 99 | | 92, 94, 96, 98 in |
| | | in US20170000901 | | US20170000901 |
| OX40 | VH | Identifier 101, 103, | VL | Identifier 10, 45, 47, |
| | | 105, 107, 109, 111, | | 49, 8 in |
| | | 113, 115, 117, 119, | | US8283450; |
| | | 121, 123, 124, 125, | | Identifier 11, 7 in |
| | | 17, 28, 318, 37, 48, | | US9428570; |
| | | 50, 58, 66,, 74, 85, | | Identifier 116, 120, |
| | | 93, 95, 97, 99 in | | 122, 30, 38, 49, 57, |
| | | WO2016196228; | | 65, 73, 84, 86, 94, 98 |
| | | Identifier 31, 34, 36, | | in WO2016196228; |
| | | 38, 40, 42, 44, 46, | | Identifier 24, 26, 27, |
| | | 48, 50, 53, 54, 55, | | 28, 30, 60, 8, 81, 82, |
| | | 58, 59, 61 in | | 83, 84, 85, 86, 87, 88, |
| | | US20150190526; | | 89 in US8748585; |
| | | Identifier 33, 35, 37, | | Identifier 30, 32 in |
| | | 39, 41, 43, 45, 47, | | US20160137740; |
| | | 49, 51, 53, 55, 57, | | Identifier 32, 35, 39, |
| | | 59, 61, 63, 65, 67, | | 41, 43, 45, 47, 49, 51, |
| | | 71 in | | 52, 56, 57, 62 in |
| | | US20160137740; | | US20150190506; |
| | | Identifier 44, 46, 48, | | Identifier 29, 37 in |
| | | 7, 9 in | | US20160137740 |
| | | US8283450; | | |
| | | Identifier 9, 15 in | | |
| | | US9428570; | | |
| | | Identifier 19, 21, 22, | | |
| | | 23, 29, 58, 59, 7, 77, | | |
| | | 78, 79, 80 in | | |
| | | US8748585 | | |
| MUCIN1 | VH | Identifier 101, 106, | VL | Identifier 148, 158, |
| | | 109, 115, 119, 123, | | 162, 167, 170, 174, |
| | | 127, 141, 15, 23, 28, | | 184, 190, 193, 203, |
| | | 33, 39, 42, 47, 5, 57, | | 208, 211, 220, 225, |
| | | 66, 70, 75, 80, 83, | | 229, 234, 242, 246, |
| | | 87, 92 in | | 250, 255, 261, 270, |
| | | EP3049812A2 | | 275, 279, 283, 291, |
| | | | | 297, 303, 308, 315, |
| | | | | 319, 323, 333, 340 |
| | | | | in EP3049812A2 |
| MCSF | VH | Identifier 102, 10, 14, | VL | Identifier 8, 32, 52, |
| | | 18, 2, 22, 26, 30, 34, | | 60, 28, 36, 4, 44, 48, |
| | | 38, 46, 50, 54, 58, 6, | | 56, 62, 12, 16, 20, 24 |
| | | 66, 70, 74, 78, 82, | | in WO2005030124 |
| | | 86, 90, 94, 98 in | | |
| | | WO2005030124 | | |
| LAG3 | VH | Identifier 102, 106, | VL | Identifier 32, 36, 40, |
| | | 110, 113, 122, 18, 30, | | 44, 48, 52, 56, 60, 84, |
| | | 66, 70, 74, 78 in | | 88, 92, 96, 134, 34, |
| | | US20150259420; | | 38, 42, 46, 50, 54, 58, |
| | | Identifier 100, 104, | | 60, 86, 90, 94, 98 in |
| | | 108, 28, 64, 68, 72, | | US20150259420; |
| | | 76, 8, 80 in | | Identifier 2 in |
| | | US20150259420; | | WO2015042246 |
| | | Identifier 1 in | | |
| | | WO2015042246 | | |
| TIM3 | VH | Identifier 102, 112, | — | — |
| | | 12, 2, 22, 32, 42, 52, | | |
| | | 62, 72, 82, 91 in | | |
| | | US20150086574; | | |
| | | Identifier 82 in | | |
| | | WO2013006490; | | |
| | | Identifier 13, 21, 29, | | |
| | | 37, 45, 5, 53, 61, 69, | | |
| | | 77, 85, 93 in | | |
| | | WO2016179319A1; | | |
| | | Identifier 7 in | | |
| | | WO2013006490; | | |
| | | Identifier 107, 117, | | |
| | | 17, 27, 37, 47, 57, | | |
| | | 67, 7, 77, 87, 97 in | | |
| | | US20150086574; | | |
| | | Identifier 17, 25, 33, | | |
| | | 41, 49, 57, 65, 73, | | |
| | | 81, 89, 9, 97 in | | |
| | | WO2016179319A1 | | |
| CD2 | VH | Identifier 103, 117, | VL | Identifier 102, 116 in |
| | | 119 in | | WO2016122701 |
| | | WO2016122701 | | |
| CD52 | VH | Identifier 103, 136, | VL | Identifier 102, 138 |
| | | 137 in | | in WO2010132659 |
| | | WO2010132659 | | |
| WT1/HLA | VH | Identifier 104, 111, | VL | Identifier 106, 112, |
| Bispecific | | 128, 14, 32, 50, 68, | | 130, 34, 52, 70, 88 in |
| | | 86 in | | WO2015070061 |
| | | WO2015070061 | | |
| CD3 | VH | Identifier 108, 112, | VL | Identifier 104 in |
| | | 115 in | | WO2016122701; |
| | | WO2016122701; | | Identifier 13 in |
| | | Identifier 29 in | | WO2016126213A1 |
| | | WO2014144722 A2; | | |
| | | Identifier 12 in | | |
| | | WO2016126213A1 | | |
| PG9 | VH | Identifier 11 in | VL | Identifier 10 in |
| | | EP3074419A2 | | EP3074419A2 |
| V2 | VH | Identifier 11 in | — | — |
| | | US20160194375A1 | | |
| HSP | VH | Identifier 11, 12 in | VL | Identifier 16, 17 in |
| | | WO2016120217 | | WO2016120217 |
| CD37 | VH | Identifier 11, 12, 18 | VL | Identifier 14, 15 in |
| | | in US20170000900 | | US20170000900 |
| CD123 | VH | Identifier 11, 13, 14, | VL | Identifier 9, 11, 18, |
| | | 21 in | | 19, 20, 21, 22, 23 in |
| | | WO2015140268A1; | | WO2016120220; |
| | | Identifier 113, 115, | | Identifier 12, 16, 18, |
| | | 57, 59, 63 in | | 19, 22 in |
| | | WO2016120216; | | WO2015140268A1; |
| | | Identifier 12, 123, | | Identifier 275, 276, |
| | | 24, 25, 26, 27, 28, 29, | | 277, 278, 307, 308, |
| | | 30, 9 in | | 309, 310 in |
| | | WO20161620220; | | WO2016028896; |
| | | Identifier 216, 217, | | Identifier 5 in |
| | | 218, 219, 274 in | | US20160333108A1; |
| | | WO2016028896 | | Identifier 114, 116, |
| | | | | 58, 60, 64 in |
| | | | | WO2016120216 |
| GD3 | VH | Identifier 11, 13, 15, | VL | Identifier 12, 14, 16, |
| | | 17 in | | 18 in |
| | | WO2016185035A1 | | WO2016185035A1 |
| TAG72 | VH | Identifier 115 in | VL | Identifier 116 in |
| | | US20160333114A1 | | US20160333114A1 |
| MCAM | VH | Identifier 115, 116, | VL | Identifier 109, 110, |
| | | 117, 118, 119, 157, | | 111, 112, 121, 122, |
| | | 158, 159, 160, 161, | | 123 in |
| | | 178, 179 in | | US20150259419; |
| | | US20150259419; | | Identifier 30, 40, 50, |
| | | Identifier 35, 45, 55, | | 60, 70, 71, 72 in |
| | | 65, 77, 89 in | | US20150239980 |
| | | US20150239980; | | |
| | | Identifier 101, 102, | | |
| | | 103, 104, 105, 106, | | |
| | | 107 in | | |
| | | US20150259419 | | |
| CA19.9 | VH | Identifier 117 in | VL | Identifier 118 in |
| | | US20160333114A1 | | US20160333114A1 |
| BMPR1A | VH | Identifier 12 in | — | — |
| | | WO2011116212 | | |
| LGR4 | VH | Identifier 12, 13, 5, | VL | Identifier 10, 11, 6 in |
| | | 9 in | | US20160046723 |
| | | US20160046723 | | |
| APRIL | VH | Identifier 12, 14, 16. | VL | Identifier 20, 22, 24, |
| | | 18. 3. 32, 34, 36, 38, | | 26, 28, 30, 4, 50 in |
| | | 40, 42, 44, 46, 48, | | US2016026467 |
| | | 52 in | | |
| | | US20160264674 | | |
| FcRL5 | VH | Identifier 12, 16, 20, | VL | Identifier 11, 15, 19, |
| (FcReceptor- | | 24, 28, 32, 36, 4, 40, | | 23, 27, 3, 31, 35, 39, |
| Like5) | | 44, 48, 8, 915, 919 | | 43, 47, 7, 917, 921 |
| | | in WO2016090337 | | WO2016090337 |
| CLDN18.2 | VH | Identifier 12, 2 in | VL | Identifier 13, 3 in |
| | | US20160347915A1 | | US20160347815A1 |
| ROR1 | VH | Identifier 12, 20, 28, | VL | Identifier 16, 24, 32, |
| | | 36, 44, 60, 68 | | 40, 56, 64, 72, 36, 62, |
| | | WO2016016343A1; | | 23, 49, 58 |
| | | Identifier 57, 19, 31, | | WO2016016343A1; |
| | | 45, 53, 71 in | | Identifier 86, 88, 90 in |
| | | WO2016016344A1; | | WO2016120216; |
| | | Identifier 85, 87, 89 | | Identifier 126, 127, |
| | | in WO2016120216; | | 234, 235, 236, 237, |
| | | Identifier 122, 125, | | 238, 240, 241, 242, |
| | | 175, 176, 179, 180, | | 243, 244, 245, 246, |
| | | 181, 182, 183, 184, | | 247, 248 in |
| | | 185, 186, 187, 188, | | US20160208018A1; |
| | | 189, 190, 191, 192, | | Identifier 56 in |
| | | 193, 194, 195, 196, | | EP3083671A1; |
| | | 197, 197, 199, 200, | | Identifier 103, 111, |
| | | 201, 202, 203, 204, | | 127, 135, 143, 15, 151, |
| | | 205, 206, 207, 208, | | 159, 167, 175, 183, |
| | | 209 in | | 191, 199, 207, 215, |
| | | US20160208018A1; | | 223, 23, 231, 239, |
| | | Identifier 55 in | | 247, 255, 263, 271, |
| | | EP3083671A1; | | 279, 287, 295, 303, |
| | | Identifier 104, 112, | | 31, 311, 319, 327, 335, |
| | | 120, 128, 152, 16, | | 343, 351, 359, 39, 47, |
| | | 160, 168, 176, 184, | | 55, 53, 7, 71, 79, 87, |
| | | 192, 200, 208, 216, | | 95 in |
| | | 224, 232, 24, 240, | | WO2016187216A1 |
| | | 248, 256, 264, 272, | | |
| | | 280, 288, 296, 304, | | |
| | | 312, 32, 320, 336, | | |
| | | 344, 352, 360, 40, | | |
| | | 48, 56, 64, 72, 8, 80, | | |
| | | 88 in | | |
| | | WO2016187216A1 | | |
| B7H1 | VH | Identifier 12, 32, 42, | VL | Identifier 17, 37, 47, |
| | | 52, 72, 2, 62 in | | 57, 7, 77, 27, 67 in |
| | | US20130034559 | | US20130034559 |
| CD32B | VH | Identifier 127 in | VL | Identifier 126 in |
| | | WO2016122701 | | WO2016122701 |
| CD64 | VH | Identifier 129 in | VL | Identifier 128 in |
| | | WO2016122701 | | WO2016122701 |
| PG16 | VH | Identifier 13 in | VL | Identifier 12 in |
| | | EP3074419A2 | | EP3074419A2 |
| MPER | VH | Identifier 13 in | VL | Identifier 12 in |
| | | US20160194375A1 | | US20160194375A1 |
| CD105 | VH | Identifier 13, 14, 16 | VL | Identifier 1, 17, 20, |
| | | in WO2014039682 | | 22, 23 in |
| | | | | WO2014039682 |
| CLL1 | VH | Identifier 13, 14, 15, | VL | Identifier 16, 18, 20, |
| | | 17, 19, 21, 23, 25, | | 22, 24, 26, 28, 30, 32, |
| | | 27, 29, 31, 33, 35 in | | 24, 36 in |
| | | WO2016120219; | | WO2016120219; |
| | | Identifier 195, 65, | | Identifier 196, 78, 79, |
| | | 66, 67, 68, 69, 70, | | 80, 81, 82, 83, 84, 85, |
| | | 71, 72, 73, 74, 75, | | 86, 87, 88, 89, 90 in |
| | | 76, 77 in | | WO2016014535; |
| | | WO2016014535; | | Identifier 30, 32, 35, |
| | | Identifier 31, 33, 34, | | 37, 39, 41 in |
| | | 36, 38, 40, 42, 46 in | | US20160075787; |
| | | US20160075787; | | Identifier 152, 104, |
| | | Identifier 150, 103, | | 106, 108, 110, 112, |
| | | 105, 107, 109, 111, | | 114, 116, 118 in |
| | | 113, 115, 117 in | | WO2016179319A1 |
| | | WO2016179319A1 | | |
| GPRC5D | VH | Identifier 13, 17, 21, | VL | Identifier 10, 14, 18, 2, |
| | | 25, 29, 314, 326, 33, | | 22, 26, 30, 303, 315, |
| | | 338, 350, 362, 37, | | 327, 339, 34, 351, 363, |
| | | 374, 386, 41, 45, 49, | | 375, 38, 387, 42, 46, |
| | | 5, 53, 57, 61, 65, 69, | | 50, 54, 58, 6, 62, 66, |
| | | 73, 77, 81, 85, 89, 93, | | 70, 74, 78, 82, 86, 94 |
| | | 1, 9 in | | in WO2016090312 |
| | | WO2016090312 | | |
| EFNA4 | VH | Identifier 13, 39 in | — | — |
| | | US20150125472 | | |
| CD79 | VH | Identifier 131 in | VL | Identifiier 130 in |
| | | WO2016122701 | | WO2016122701 |
| FGFR3 | VH | Identifier 132, 134, | VL | Identifier 133, 135, |
| | | 136 in US9499623 | | 137 in US9499623 |
| TCR | VH | Identifier 133 in | VL | Identifier 132 in |
| | | WO2016122701 | | WO2016122701 |
| MN | VH | Identifier 133, 135, | VL | Identifier 134, 136, |
| | | 137, 139, 141, 143, | | 138, 140, 142, 144, |
| | | 145, 147, 149, 151 in | | 146, 148, 150, 152 in |
| | | WO2007070538 | | WO200707538 |
| IL33 | VH | Identifier 134, 136, | VL | Identifier 135, 137, |
| | | 138, 185, 187, 189, | | 139, 184, 188, 217, |
| | | 216, 218, 220, 221, | | 219, 237, 247, 283, |
| | | 236, 246, 282, 284, | | 285, 287, 37, 39, 41, |
| | | 286, 36, 38, 40, 84, | | 87 in |
| | | 86, 88 in | | US20160168242 |
| | | US20160168242 | | |
| NKG2D | VH | Identifier 135, 137 | VL | Identifier 134, 136 in |
| | | in WO2016122701 | | WO2016122701 |
| CD30 | VH | Identifier 14, 16 in | VL | Identifier 13, 15 in |
| | | WO2016134284 | | WO2016134284 |
| EGFR | VH | Identifier 14, 50, 9 | VL | Identifier 15 in |
| | | in WO2015143382; | | WO2015143382; |
| | | Identifier 12, 14, 15, | | Identifier 14 in |
| | | 21 in | | WO2014143765; |
| | | US20100008978A1; | | Identifier 4051, 4052, |
| | | Identifier 2123 in | | 4053, 4054, 4055, |
| | | WO2018231759 | | 4056, 4057, 4058, |
| | | | | 4059, 4060, 4061, |
| | | | | 4062, 4063, 4064, |
| | | | | 4065, 4066, 4067, |
| | | | | 4068, 4069, 4070, |
| | | | | 4071, 4072, 4073, |
| | | | | 4074, 4075, 4076, |
| | | | | 4077, 4078, 4079, |
| | | | | 4080, 4081, 4082, |
| | | | | 4083, 4084, 4085, |
| | | | | 4086, 4087, 4088, |
| | | | | 4089. 4090, 4091, |
| | | | | 4092, 4093, 4094, |
| | | | | 4095, 4096, 4097, |
| | | | | 4098, 4099, 4100, |
| | | | | 4101, 4102, 4103, |
| | | | | 4104, 4105, 4106, |
| | | | | 4107, 4108, 4109, |
| | | | | 4110, 4111, 4112, |
| | | | | 4113, 4114, 4115, |
| | | | | 4116, 4117, 4118, |
| | | | | 4119, 4120, 4121, |
| | | | | 4122, 4123, 4124, |
| | | | | 4125, 4126, 4127, |
| | | | | 4128, 4129, 4130, |
| | | | | 4131, 4132, 4133, |
| | | | | 4134, 4135, 4136, |
| | | | | 4137, 4138, 4139, |
| | | | | 4140, 4141, 4142, |
| | | | | 4143, 4144, 4145, |
| | | | | 4156, 4147, 4148, |
| | | | | 4149, 4150, 4151, |
| | | | | 4152, 4153, 4154, |
| | | | | 4155, 4156, 4157, |
| | | | | 4158, 4159, 4160, |
| | | | | 4161, 4162, 4163, |
| | | | | 4164, 4165, 4166, |
| | | | | 4167, 4168, 4169, |
| | | | | 4170, 4171, 4172, |
| | | | | 4173, 4174, 4175, |
| | | | | 4176, 4177, 4178, |
| | | | | 4179, 4180, 4181, |
| | | | | 4182, 4183, 4184, |
| | | | | 4185, 4186, 4187, |
| | | | | 4188, 4189, 4190, |
| | | | | 4191, 4192, 4193, |
| | | | | 4194, 4195, 4196, |
| | | | | 4197, 4198, 4199, |
| | | | | 4200, 4201, 4202, |
| | | | | 4203, 4204, 4205, |
| | | | | 4206, 4207, 4208, |
| | | | | 4209, 4210, 4211, |
| | | | | 4212, 4213, 4214, |
| | | | | 4215, 4216, 4217, |
| | | | | 4218, 4219, 4220, |
| | | | | 4221, 4222, 4223, |
| | | | | 4224, 4225, 4226, |
| | | | | 4227, 4228, 4229, |
| | | | | 4230, 4231, 4232, |
| | | | | 4233, 4234, 4235, |
| | | | | 4236, 4237, 4238, |
| | | | | 4239, 4240, 4241, |
| | | | | 4242, 4243, 4244, |
| | | | | 4245, 4246, 4247, |
| | | | | 4248, 4249, 4250, |
| | | | | 4251, 4252, 4253, |
| | | | | 4254, 4255, 4256, |
| | | | | 4257, 4258, 4259, |
| | | | | 4260, 4261, 4262, |
| | | | | 4263, 4264, 4265, |
| | | | | 4266, 4267, 4268, |
| | | | | 4269, 4270, 4271, |
| | | | | 4272, 4273, 4274, |
| | | | | 4275, 4276, 4277, |
| | | | | 4278, 4279, 42870, |
| | | | | 4281, 4282, 42834284, |
| | | | | 4285, 4286, 4287, |
| | | | | 4288, 4289, 4290, |
| | | | | 4291, 4292, 4293, |
| | | | | 4294, 4295, 4296, |
| | | | | 4297, 4298, 4299, |
| | | | | 4300, 4301, 4302, |
| | | | | 4303, 4304, 4305, |
| | | | | 4306, 4307, 4308, |
| | | | | 4309, 4310, 4311, |
| | | | | 4312, 4313, 4314, |
| | | | | 4315, 4316, 4317, |
| | | | | 4318, 4319, 4320, |
| | | | | 4321, 4322, 4324, |
| | | | | 4325, 4326, 4327, |
| | | | | 4328, 4329, 4330, |
| | | | | 4331, 4332, 4333, |
| | | | | 4334, 4335, 4336, |
| | | | | 4337, 4338, 4339, |
| | | | | 4340, 4341, 4342, |
| | | | | 4343, 4344, 4345, |
| | | | | 4346, 4347, 4348, |
| | | | | 4349, 4350, 4351, |
| | | | | 4352, 4353, 4354, |
| | | | | 4355, 4356, 4357, |
| | | | | 4358, 4359, 4360, |
| | | | | 4361, 4362, 4363, |
| | | | | 4364, 4365, 4366, |
| | | | | 4367, 4368, 4369, |
| | | | | 4370, 4371, 4372, |
| | | | | 4373, 4374, 4375, |
| | | | | 4376, 4377, 4378, |
| | | | | 4379, 4380, 4381, |
| | | | | 4382, 4383, 4384, |
| | | | | 4385, 4386, 4387, |
| | | | | 4388, 4389, 4390, |
| | | | | 4391, 4392, 4393, |
| | | | | 4394, 4395, 4396, |
| | | | | 4397, 4398, 4399, |
| | | | | 4400, 4401, 4402, |
| | | | | 4403, 4404, 4405, |
| | | | | 4406, 4407, 4408, |
| | | | | 4409, 4410, 4411, |
| | | | | 4412, 4413, 4414, |
| | | | | 4415, 4416, 4417, |
| | | | | 4418, 4419, 4420, |
| | | | | 4421, 4422, 4423, |
| | | | | 4424, 4425, 4426, |
| | | | | 4427, 4428, 4429, |
| | | | | 4430, 4431, 4432, |
| | | | | 4433, 4434, 4435, |
| | | | | 4436, 4437, 4438, |
| | | | | 4439, 4440, 4441, |
| | | | | 4442, 4443, 4444, |
| | | | | 4445, 4446, 4447, |
| | | | | 4448, 4449, 4450, |
| | | | | 4451, 4452, 4453, |
| | | | | 4454, 4455, 4456, |
| | | | | 4457, 4458, 4459, |
| | | | | 4460, 4461, 4462, |
| | | | | 4463, 4464, 4465, |
| | | | | 4466, 4467, 4468, |
| | | | | 4469, 4470, 4471, |
| | | | | 4472, 4473, 4474, |
| | | | | 4475, 4476, 4477, |
| | | | | 4478, 4479, 4480, |
| | | | | 4481, 4482, 4483, |
| | | | | 4484, 4485, 4486, |
| | | | | 4487, 4488, 4489, |
| | | | | 4490, 4491, 4492, |
| | | | | 4493, 4494, 4495, |
| | | | | 4496, 4497, 4498, |
| | | | | 4499, 4500, 4501, |
| | | | | 4502, 4503, 4504, |
| | | | | 4505, 4506, 4507, |
| | | | | 4508, 4509, 4510, |
| | | | | 4511, 4512, 4513, |
| | | | | 4514, 4515, 4516, |
| | | | | 4517, 4518, 4519, |
| | | | | 4520, 4521, 4522, |
| | | | | 4523, 4524, 4525, |
| | | | | 4526, 4527, 4528, |
| | | | | 4529, 4530, 4531, |
| | | | | 4532, 4533, 4534, |
| | | | | 4535, 4536, 4537, |
| | | | | 4538, 4539, 4540, |
| | | | | 4541, 4542, 4543, |
| | | | | 4544, 4545, 4546, |
| | | | | 4547, 4548, 4549, |
| | | | | 4550, 4551, 4552, |
| | | | | 4553, 4554, 4555, |
| | | | | 4556, 4557, 4558, |
| | | | | 4559, 4560, 4561, |
| | | | | 4562, 4563, 4564, |
| | | | | 4565, 4566, 4567, |
| | | | | 4568, 4569, 4570, |
| | | | | 4571, 4572, 4573, |
| | | | | 4574, 4575, 4576, |
| | | | | 4577, 4578, 4579, |
| | | | | 4580, 4581, 4582, |
| | | | | 4583, 4584, 4585, |
| | | | | 4586, 4587, 4588, |
| | | | | 4589, 4590, 4591, |
| | | | | 4592, 4593, 4594, |
| | | | | 4595, 4596, 4597, |
| | | | | 4598, 4599, 4600, |
| | | | | 4601, 4602, 4603, |
| | | | | 4604, 4605, 4606, |
| | | | | 4607, 4608, 4609, |
| | | | | 4610, 4611, 4612, |
| | | | | 4613, 4614, 4615, |
| | | | | 4616, 4617, 4618, |
| | | | | 4619, 4620, 4621, |
| | | | | 4622, 4623, 4624, |
| | | | | 4625, 4626, 4627, |
| | | | | 4628, 4629, 4630, |
| | | | | 4631, 4632, 4633, |
| | | | | 4634, 4635, 4636, |
| | | | | 4637, 4638, 4639 in |
| | | | | WO2018231759 |
| Her2 | VH | Identifier 141, 262, | VL | Identifier 140 in |
| | | 264, 266, 268, 270 | | WO2016054555A2; |
| | | in WO2016168773A3; | | Identifier 261, 263, |
| | | Identifier 11 in | | 265, 267, 269 in |
| | | US9518118; | | WO2016168773A3; |
| | | Identifier 62 in | | Identifier 10, 18, 23 in |
| | | US20160333114A1; | | US9518118; |
| | | Identifier 19, 24 in | | Identifier 3 in |
| | | US9518118 | | WO2016168769A1; |
| | | | | Identifier 59, 61 in |
| | | | | US20160333114A1 |
| EFNA | VH | Identifier 149, 153, | VL | Identifier 151, 155, |
| | | 157, 161 in | | 159, 163 in |
| | | US20150125472 | | WO2012118547; |
| | | | | Identifier 27, 53 in |
| | | | | US20150125472 |
| PGT1 | VH | Identifier 15 in | — | — |
| | | EP307441 | | |
| Factor XII | VH | Identifier 15 in | VL | Identifier 17 in |
| | | WO2014089493 | | WO2014089493 |
| E7MC | VH | Identifier 15, 16, 17, | VL | Identifier 238, 239, |
| | | 18, 19, 20, 21, 22, 23, | | 240, 241, 242, 243, |
| | | 233, 234, 235, 236, | | 36, 37, 38, 39, 41, 42, |
| | | 237, 24, 25, 26, 27, | | 43, 44, 45, 46, 47, 48, |
| | | 28, 29, 30, 31, 32, 33, | | 49, 50, 51, 52, 53, 54, |
| | | 34, 35 in | | 55, 56 in |
| | | WO2016182957A1 | | WO2016182957A1 |
| ICOS | VH | Identifier 15, 16, 19, | VL | Identifier 17, 18, 20, |
| | | 23, 7 in | | 24, 8 in |
| | | US20160215059 | | US20160215059 |
| CD76b | VH | Identifier 15, 17, 19, | VL | Identifier 16, 18, 22, |
| | | 23, 27, 29, 37, 57, 59, | | 38, 58, 60, 62 in |
| | | 61 in | | US20160159906 |
| | | US20160159906 | | |
| MUC1C ECD | VH | Identifier 15, 19, 23, | VL | Identifier 17, 21, 25, |
| | | 60, 64, 68, 72 in | | 62, 66, 70, 75 in |
| | | US20160340442A1 | | US20160340442A1 |
| CD4BS | VH | Identifier 15, 3 in | VL | Identifier 14, 2 in |
| | | US20160194375A1 | | US20160194375A1 |
| CD7 | VH | Identifier 16, 20 in | VL | Identifier 17, 21 in |
| | | WO2016126213A1 | | WO2016126213A1 |
| PGT2 | VH | Identifier 17 in | VL | Identifier 16 in |
| | | EP3047719A2 | | EP3074419A2 |
| OTK3 | VH | Identifier 17 in | VL | Identifier 18 in |
| | | WO2015158868 | | WO2015158868 |
| GD2 | VH | Identifier 17 in | VL | Identifier 10, 2, 5, 7, |
| | | WO2016134284; | | 9 in |
| | | Identifier 1 in | | US20130216528; |
| | | US20130216528; | | Identifier 11, 12 in |
| | | Identifier 10, 9 in | | WO2015132604; |
| | | WO2015132604; | | Identifier 18 in |
| | | Identifier 3, 4, 6, 8 in | | WO2016134284 |
| | | US20130216528 | | |
| Trophoblast | VH | Identifier 17, 13, 15, | VL | Identifier 18, 12, 14, |
| Glycoprotein | | 11 in | | 16 in |
| 5T4 | | WO2016034666A1 | | WO2016034666A1 |
| AMC | VH | Identifier 17, 18, 19, | VL | Identifier 27, 28, 29, |
| | | 20, 21, 22, 23, 24, 25, | | 31, 32, 33, 34, 35, 36 |
| | | 26 in | | in WO2016161390 |
| | | WO2016161390 | | |
| Factor D | VH | Identifier 17, 20, 27, | VL | Identifier 16, 18, 19, |
| | | 29, 30, 31, 32, 33, 4 | | 26, 3 in |
| | | in US20160017052 | | US20160017052 |
| CD276 | VH | Identifier 17, 26, 7 in | VL | Identifier 18, 27 in |
| | | US20160053017 | | US20160053017 |
| B7H3 | VH | Identifier 17, 26, 7 in | VL | Identifier 18, 27, 8 in |
| (CD276) | | WO2016044383 | | WO2016044383 |
| RAS | VH | Identifier 17, 47, 57, | VL | Identifier 19, 49, 59, |
| | | 67, 7, 77 in | | 69, 79, 9 in |
| | | WO2016154047 | | WO2016154047 |
| DR5 | VH | Identifier 18, 82, 90, | VL | Identifier 13, 23, 25, |
| | | 98, 8 in | | 27, 3, 78, 86, 94, 29 in |
| | | WO2016122701 | | WO2016122701; |
| | | | | Identifier 62 in |
| | | | | WO2016122701; |
| | | | | Identifier 54 in |
| | | | | WO2016122701; |
| | | | | Identifier 70 in |
| | | | | WO2016122701 |
| PGT3 | VH | Identifier 19 in | VL | Identifier 18 in |
| | | EP3074419A2 | | EP3074419A2 |
| PD1 | VH | Identifier 19 in | VL | Identifier 2, 39, 7, 8, |
| | | US20150290316; | | 9 in |
| | | Identifier 25, 26, 27, | | US 20160159905; |
| | | 28, 29 in | | Identifier 21 in |
| | | US20130291136; | | US20150290316; |
| | | Identifier 29, 3, 38 in | | Identifier 30, 31, 32, |
| | | US20160159905; | | 33 in |
| | | Identifier 38, 50 in | | US20130291136; |
| | | WO2015112900; | | Identifier 42, 46, 54 in |
| | | Identifier 4, 4, 6 in | | WO2015112900; |
| | | US20160159905; | | Identifier 58, 62, 66, |
| | | Identifier 82, 86 in | | 70, 74, 78 in |
| | | WO2015112900; | | WO2015112900; |
| | | Identifier 17 in | | Identifier 18 in |
| | | WO2014055648; | | WO2014055648; |
| | | Identifier 4 in | | Identifier 5 in |
| | | WO2016040892; | | WO2016040892; |
| | | Identifier 12 in | | Identifier 13 in |
| | | US20150190506 | | US20150190506 |
| NYBR1 | VH | Identifier 19 in | VL | Identifier 18 in |
| | | US20160333422A1 | | US20160333422A1 |
| CD28 | VH | Identifier 19 in | VL | Identifier 20 in |
| | | WO2015158868 | | WO2015158868 |
| Tn | VH | Identifier 19, 20 in | — | — |
| Glycopeptide | | WO2015120180 | | |
| human- | VH | Identifier 19, 29, 38, | | |
| ERBB3 | | 45, 55, 61, 9 in | VL | Identifier 10, 20, 30, |
| | | WO2013052745 | | 39, 46, 56, 62 in |
| | | | | WO2013052745 |
| Olfml3 | VH | Identifier 19, 3 in | VL | Identifier 20, 4 in |
| | | WO2015054441A1 | | WO2015054441A1 |
| RHAMM | VH | Identifier 2 in | VL | Identifier 4 in |
| antagonist | | WO2000029447 | | WO2000029447 |
| body | | | | |
| CD38 | VH | Identifier 2 in | VL | Identifier 1, 11 in |
| | | WO2009080830; | | WO2009080830 |
| | | Identifier 10 in | | |
| | | WO2015121454 | | |
| PDl | VH | Identifier 2 in | VL | Identifier 11 in |
| (Nivolumab) | | WO2016040892; | | US20150190506 |
| | | Identifier 10 in | | |
| | | US20150190506 | | |
| PDK1 | vH | Identifier 2 in | VL | Identifier 9 in |
| | | WO2016090365 | | WO2016090365 |
| IL21 | VH | Identifier 2, 3 in | — | — |
| | | US20160145332 | | |
| ERBB2 | VH | Identifier 2, 4 in | VL | Identifier 1 in |
| | | US20110129464; | | US20110129464; |
| | | Identifier 10, 2, 26, | | Identifier 12, 16, 20, |
| | | 30, 38, 4, 40, 42, 52, | | 24, 32, 36, 44, |
| | | 54, 56, 57, 58, 6 in | | 50, 51, 53, 8 in |
| | | US20130089544; | | US20130089544; |
| | | Identifier 8 in | | Identifier 7 in |
| | | US20130266564; | | US20130266564; |
| | | Identifier 1 in | | Identifier 3 in |
| | | US20150104443 | | US20150104443 |
| 5T4 | VH | Identifier 2, 4 in | VL | Identifier 1, 3 in |
| | | WO2016022939 | | WO2016022939 |
| GPDL1 | VH | Identifier 20 in | — | — |
| | | US20160108123 | | |
| GM2 | VH | Identifier 20, 22, 23, | VL | Identifier 21, 24, 25, |
| | | 26, 27, 28, 29, 30 in | | 31, 32, 33, 34, 35 in |
| | | US20090028877 | | US20090028877 |
| EphA2 | VH | Identifier 20, 22, 24, | VL | Identifier 26, 28, 30, |
| receptor | | 32, 34, 36, 37, 38, 40, | | 47, 48, 49, 50, 52, 78, |
| | | 42, 43, 45, 74, 76 in | | 80 in |
| | | US20150274824 | | US20150274824 |
| KDR | VH | Identifier 20, 24, 26, | VL | Identifier 22 in |
| | | 29, 31, 33 in | | WO2003075840 |
| | | WO2003075840 | | |
| PGT4 | VH | Identifier 21 in | VL | Identifier 20 in |
| | | EP3074419A2 | | EP3074419A2 |
| CD324 | VH | Identifier 21, 23, 25, | VL | Identifier 20, 22, 24 |
| | | 27, 29, 31, 33, 35, 37, | | 26, 28, 30, 32, 34, 36, |
| | | 39, 41, 43, 45, 47, 49, | | 38, 40, 42, 44, 46, 48, |
| | | 51, 53, 55, 57, 59, 61, | | 50, 52, 54, 56, 58, 60, |
| | | 63, 65, 67, 69, 71 in | | 62, 64, 66, 68, 70 in |
| | | US9534058 | | US9534058 |
| AXL | VH | Identifier 21, 3, 45 in | VL | Identifier 22, 4 in |
| | | WO2016097370 | | WO2016097370 |
| collagen | VH | Identifier 21, 4, 15, 17, | VL | Identifier 11, 12, 14, |
| | | 18, 19, 20, 5, 6, 7, 1, | | 23, 25, 26, 27, 8, 9 in |
| | | 2, 3 in | | WO2007024921 |
| | | WO2007024921 | | |
| EGFR | VH | Identifier 2124 in | VL | 4640, 4641, 4642, |
| (EGFRvIII) | | WO2018231759; | | 4643, 4644, 4645, |
| | | Identifier 13 in | | 4646, 4647, 4648, |
| | | WO2016016341; | | 4649, 4650, 4651, |
| | | Identifier 24 in | | 4652, 4653, 4654, |
| | | WO2016168773 A3; | | 4655, 4656, 4657, |
| | | Identifier 34 in | | 4658 in |
| | | US20160304615; | | WO2018231759; |
| | | Identifier 2 in | | Identifier 14 in |
| | | US20160200819A1; | | WO2016016341; |
| | | Identifier 91, 93 in | | Identifier 23 in |
| | | WO2016120216 | | WO2016168773 A3; |
| | | | | Identifier 42 in |
| | | | | US20160304615; |
| | | | | Identifier 1 in |
| | | | | US20160200819A1; |
| | | | | Identifier 92, 94 in |
| | | | | WO2016120216 |
| IL3alpha | VH | Identifier 22 in | VL | Identifier 27, 37 in |
| | | WO2008127735 | | WO2008127735 |
| CS1 | VH | Identifier 22 in | VL | Identifier 104, 106, |
| | | WO2016168773 A3; | | 108 in |
| | | 103, 105, 107, 109, | | WO2016120216; |
| | | in WO2016120216; | | Identifier 14, 16, 18, |
| | | Identifier 13, 15, 17, | | 20, 22 in |
| | | 19 in | | WO2015166056A1; |
| | | WO2015166056A1; | | Identifier 39, 41, 43, |
| | | Identifier 38, 40, 42, | | 45, 47 in |
| | | 44, 46 in | | WO2015121454; |
| | | WO2015121454; | | Identifier 110, 112 in |
| | | Identifier 26 in | | WO2016120216 |
| | | US20160075784A1 | | |
| KMA | VH | Identifier 22 in | VL | Identifier 2, 21 in |
| | | WO2016172703 A2 | | WO2016172703A2 |
| PGT5 | VH | Identifier 23 in | VL | Identifier 22 in |
| | | EP3074419A2 | | EP3074419A2 |
| CD45 | VH | Identifier 24 in | VL | Identifier 25 in |
| | | WO2016126213A1 | | WO2016126213A1 |
| leuko- | VH | Identifier 25 in | — | — |
| cytegenA2 | | WO2010065962 A2 | | |
| CD16 | VH | Identifier 25 in | VL | Identifier 26 in |
| | | WO2015158868 | | WO2015158868 |
| BCMA | VH | Identifier 26 in | VL | Identifier 25 in |
| | | WO2016168773 A3; | | WO2016168773 A3; |
| | | Identifier 142, 148, | | Identifier 42 in |
| | | 154, 160, 166, 172, | | WO2016097231; |
| | | 178, 184, 190, 196, | | Identifier 143, 149, |
| | | 202, 208, 214, 220, | | 155, 161, 167, 173, |
| | | 226, 232, 238, 244, | | 179, 185, 191, 197, |
| | | 250, 256, 262, 268, | | 203, 209, 215, 221, |
| | | 274, 280, 286, 292, | | 227, 233, 239, 245, |
| | | 298, 304, 310, 316, | | 251, 257, 263, 275, |
| | | 322, 328, 334, 340, | | 281, 287, 293, 299, |
| | | 346, 352 in | | 305, 311, 317, 323, |
| | | WO2016168595A1; | | 329, 335, 341, 347, |
| | | Identifier 8 in | | 353 in |
| | | WO2016094304A3; | | WO2016168595 Al; |
| | | Identifier 171, 172, | | Identifier 192, 193, |
| | | 173, 174, 175, 176, | | 194, 195, 196, 197, |
| | | 177, 178, 179, 180, | | 198, 199, 200, 201, |
| | | 181, 182, 183, 184, | | 204, 205, 207, 208, |
| | | 185, 186, 187, 190, | | 211, 259, 260, 84, 85, |
| | | 255, 257, 258, 69, 70, | | 86, 87, 88, 89, 90, 91, |
| | | 71, 72, 73, 74, 75, 76, | | 92, 93, 94, 95, 96, 97, |
| | | 77, 78, 79, 80, 81 | | 98 in |
| | | WO2016014565; | | WO2016014565; |
| | | Identifier 38 in | | Identifier 53 in |
| | | EP3057994A1; | | WO2016187349A1; |
| | | Identifier 55 in | | Identifier 7 in |
| | | WO2016187349A1; | | WO2016094304 A3; |
| | | Identifier 1, 13, 17, 21, | | Identifier 10, 14, 18, |
| | | 25, 29, 33, 37, 41, 45, | | 2, 22, 26, 30, 34, 38, |
| | | 49, 5, 53, 57, 61, 65, 9 | | 42, 46, 50, 54, 58, 6, |
| | | in WO2016090320; | | 62, 66 in |
| | | Identifier 101, 743, | | WO2016090320; |
| | | 174, 758, 95, 759, | | Identifier 100, 102, |
| | | 97, 760, 99 in | | 175, 96, 98 in |
| | | WO2016120216; | | WO2016120216; |
| | | Identifier 11, 741, | | Identifier 12, 14, 16, |
| | | 17 in | | 18 in |
| | | WO2015158671Al; | | WO201515867A1; |
| | | Identifier 10, 11, 12, | | Identifier 7, 8, 9 in |
| | | 13, 14 in | | WO2016014789; |
| | | WO2016014789; | | Identifier 14 in |
| | | Identifier 15 in | | WO2016168766A1 |
| | | WO2016168766A1 | | |
| humanCD79b | VH | Identifier 27 in | VL | Identifier 28, 30 in |
| | | WO2016112870 | | WO2016112870 |
| | | humanCD79b VH | | |
| | | 2304 Identifier 29 in | | |
| | | WO2016112870 | | |
| B2MG | VH | Identifier 28 in | VL | Identifier 29 in |
| | | WO2016126213A1 | | WO2016126213A1 |
| CD19H 803 | VH | Identifier 28, 29, 32, | — | — |
| | | 33, 34, 35 in | | |
| | | WO2016168773 A3; | | |
| | | Identifier 51 in | | |
| | | WO2016187349A1; | | |
| | | Identifier 20 in | | |
| | | US20160039942; | | |
| | | Identifier 1 in | | |
| | | WO2014184143; | | |
| | | Identifier 5 in | | |
| | | US20160145337Al; | | |
| | | Identifier 166, 167, | | |
| | | 168, 172, 176, 177, | | |
| | | 181, 183, 184, 62 in | | |
| | | US20160152723; | | |
| | | Identifier 15 | | |
| | | US20160319020; | | |
| | | Identifier 17, 33, 34, | | |
| | | 35 in EP3057994Al; | | |
| | | Identifier 62 in | | |
| | | WO2016134284; | | |
| | | Identifier 111, 113 in | | |
| | | US20160333114A1 | | |
| NOTCH 2/3 | VH | Identifier 29 in | VL | Identifier 31 in |
| | | WO2013074596 | | WO2013074596 |
| KIR | VH | Identifier 3 in | VL | Identifier 5 in |
| (Lirilumab) | | US20150290316; | | US20150290316; |
| | | 2371 Identifier 1 in | | Identifier 2 in |
| | | WO2014055648 | | WO2014055648 |
| CD22 | VH | Identifier 3 in | VL | Identifier 17, 8, 14, 15, |
| | | WO2013059593; | | in US20150239974; |
| | | Identifier 10, 11, 12, | | Identifier 7 in |
| | | 7, 9, 8 in | | US20150299317; |
| | | US20150299317; | | Identifier 681 in |
| | | Identifier 201 in | | WO2016164731; |
| | | WO2016164731; | | Identifier 682 in |
| | | CD22 VH 869 | | WO2016164731; |
| | | Identifier 671 in | | Identifier 682 in |
| | | WO2016164731; | | WO2016164731; |
| | | Identifier 672 in | | Identifier 683, 2020 in |
| | | WO2016164731; | | WO2016164731; |
| | | Identifier 673 in | | Identifier 684 in |
| | | WO2016164731; | | WO2016164731; |
| | | Identifier 676 in | | Identifier 685 in |
| | | WO2016164731; | | WO2016164731; |
| | | Identifier 678 in | | Identifier 686 in |
| | | WO2016164731; | | WO2016164731; |
| | | Identifier 679 in | | Identifier 687 in |
| | | WO2016164731; | | WO2016164731; |
| | | Identifier 680 in | | Identifier 688 in |
| | | WO2016164731; | | WO2016164731; |
| | | Identifier 700 in | | Identifier 690 in |
| | | WO2016164731; | | WO2016164731; |
| | | Identifier 701 in | | Identifier 740 in |
| | | WO2016164731; | | WO2016164731; |
| | | Identifier 702 in | | Identifier 741 in |
| | | WO2016164731; | | WO2016164731; |
| | | Identifier 703 in | | Identifier 742 in |
| | | WO2016164731; | | WO2016164731; |
| | | Identifier 704 in | | Identifier 743 in |
| | | WO2016164731; | | WO2016164731; |
| | | Identifier 705 in | | Identifier 744 in |
| | | WO2016164731; | | WO2016164731; |
| | | Identifier 706 in | | Identifier 745 in |
| | | WO2016164731; | | WO2016164731; |
| | | Identifier 707 in | | Identifier 746 in |
| | | WO2016164731; | | WO2016164731; |
| | | Identifier 708 in | | Identifier 747 in |
| | | WO2016164731; | | WO2016164731; |
| | | Identifier 709 in | | Identifier 748 in |
| | | WO2016164731; | | WO2016164731; |
| | | Identifier 711 in | | Identifier 749 in |
| | | WO2016164731; | | WO2016164731; |
| | | Identifier 712 in | | Identifier 750 in |
| | | WO2016164731; | | WO2016164731; |
| | | Identifier 713 in | | Identifier 752 in |
| | | WO2016164731; | | WO2016164731; |
| | | Identifier 714 in | | Identifier 753 in |
| | | WO2016164731; | | WO2016164731; |
| | | Identifier 715 in | | Identifier 754 in |
| | | WO2016164731; | | WO2016164731; |
| | | Identifier 716 in | | Identifier 755 in |
| | | WO2016164731; | | WO2016164731; |
| | | Identifier 717 in | | Identifier 756 in |
| | | WO2016164731; | | WO2016164731; |
| | | Identifier 718 in | | Identifier 757 in |
| | | WO2016164731; | | WO2016164731; |
| | | Identifier 719 in | | Identifier 758 in |
| | | WO2016164731; | | WO2016164731; |
| | | Identifier 720 in | | Identifier 759 in |
| | | WO2016164731; | | WO2016164731; |
| | | Identifier 721 in | | Identifier 760 in |
| | | WO2016164731; | | WO2016164731; |
| | | Identifier 722 in | | Identifier 761 in |
| | | WO2016164731; | | WO2016164731; |
| | | Identifier 723 in | | Identifier 762 in |
| | | WO2016164731; | | WO2016164731; |
| | | Identifier 724 in | | Identifier 763 in |
| | | WO2016164731; | | WO2016164731; |
| | | Identifier 725 in | | Identifier 764 in |
| | | WO2016164731; | | WO2016164731; |
| | | Identifier 726 in | | Identifier 765 in |
| | | WO2016164731; | | WO2016164731; |
| | | Identifier 727 in | | Identifier 766 in |
| | | WO2016164731; | | WO2016164731; |
| | | Identifier 728 in | | Identifier 767 in |
| | | WO2016164731; | | WO2016164731; |
| | | Identifier 729 in | | Identifier 768 in |
| | | WO2016164731; | | WO2016164731; |
| | | Identifier 730 in | | Identifier 769 in |
| | | WO2016164731; | | WO2016164731; |
| | | Identifier 731 in | | Identifier 770 in |
| | | WO2016164731; | | WO2016164731; |
| | | Identifier 732 in | | Identifier 771 in |
| | | WO2016164731; | | WO2016164731; |
| | | Identifier 733 in | | Identifier 772 in |
| | | WO2016164731; | | WO2016164731; |
| | | Identifier 734 in | | Identifier 773 in |
| | | WO2016164731; | | WO2016164731; |
| | | Identifier 735 in | | Identifier 774 in |
| | | WO2016164731; | | WO2016164731; |
| | | Identifier 736 in | | Identifier 775 in |
| | | WO2016164731; | | WO2016164731; |
| | | Identifier 737 in | | Identifier 776 in |
| | | WO2016164731; | | WO2016164731; |
| | | Identifier 738 in | | Identifier 777 in |
| | | WO2016164731 | | WO2016164731; |
| | | | | Identifier 124 in |
| | | | | WO2016122701 |
| CTLA4 | VH | Identifier 3, 31, 32, 33, | VL | Identifier 36, 37, 38, |
| | | 34, 35, 41, 42, 43, 44, | | 39, 40, 46, 47, 48, 49, |
| | | 47, 7 in | | 50, 8, 4 in |
| | | US20140105914; | | US20140105914; |
| | | Identifier 4 in | | Identifier 2 in |
| | | US8697845; | | US8697845; |
| | | Identifier 19 in | | Identifier 20 in |
| | | US20150283234; | | US20150283234; |
| | | Identifier 17 in | | Identifier 18 in |
| | | WO2014066532 | | WO2014066532 |
| Integrin | VH | Identifier 3, 4, 5 in | VL | Identifier 10, 11, 8, 9 |
| | | US20140161794 | | in US20140161794 |
| IL13 | VH | Identifier 302 in | VL | Identifier 303 in |
| | | US20160168242 | | US20160168242 |
| Human | VH | Identifier 31 in | VL | Identifier 32 in |
| collagen VII | | WO2016112870 | | WO2016112870 |
| NKG2A | VH | Identifier 32 in | VL | Identifier 33 in |
| | | WO2016126213A1; | | WO2016126213A1; |
| | | Identifier 2, 3, 4, 5, 6 | | Identifier 7 in |
| | | in WO2016041947 | | WO2016041947 |
| Campath 1 | VH | Identifier 34 in | VL | Identifier 31, 33 in |
| | | US20160333114Al | | US20160333114A1 |
| KIR2DL 1 | VH | Identifier 36 in | VL | Identifier 37 in |
| | | WO2016126213A1 | | WO2016126213A1 |
| KIR2DL 2/3 | VH | Identifier 36 in | VL | Identifier 37 in |
| | | WO2016126213A1 | | WO2016126213A1 |
| VISTA | VH | Identifier 37, 38, 39, | VL | Identifier 41, 42, 43, |
| | | 40 in | | 44, 45 in |
| | | WO2015097536 | | WO2015097536 |
| CD46 | VH | Identifier 39, 47, 59, | VL | Identifier 41, 61, 21, |
| | | 15, 19, 23, 27, 31, 35, | | 25, 29, 33, 37, 45, 49, |
| | | 43, 51, 55, 63, 67, 71, | | 53, 57, 65, 69, 73, 77, |
| | | 75, 79, 83, 69, 71, 83 | | 81, 85, 17, 73, 77 |
| | | in WO2012031273; | | in WO2012031273; |
| | | Identifier 1, 10, 11, | | Identifier 23, 24, 25, |
| | | 12, 13, 14, 15, 16, 17, | | 26, 27, 28, 29, 30, 31, |
| | | 3, 5, 6, 7, 9, 18, 19, | | 32, 33, 34, 35, 36, 37, |
| | | 20, 21 in | | 38, 39, 40, 41, 42 in |
| | | WO2016040683 | | WO2016040683 |
| RHAMM | VH | Identifier 4 in | — | — |
| | | US20020127227A1 | | |
| VEGF | VH | Identifier 4, 8, in | VL | Identifier 2, 6 in |
| | | WO2000034337; | | WO2000034337; |
| | | Identifier 12, 20, 4, | | Identifier 9 in |
| | | 44 in | | US20030175276A1; |
| | | WO2006012688A1; | | Identifier 11, 19, 27, |
| | | Identifier 7 in | | 28, 3, 43 in |
| | | US20030175276A1; | | WO2006012688A1; |
| | | Identifier 152, 153, | | Identifier 160, 161, |
| | | 154, 155, 156, 157, | | 162, 163, 164, 165, |
| | | 158, 159 in | | 166, 167 in |
| | | US20160090427 | | US20160090427 |
| Endoglin | VH | Identifier 41, 42, 43, | VL | Identifier 103, 88, 89, |
| | | 71, 73, 75, 88, 89, 90, | | 90, 91, 92, 93, 94, 95, |
| | | 91, 92 in | | 96, 97, 102, 100 in |
| | | US20160009811 | | WO2011041441; |
| | | | | Identifier 100, 102, |
| | | | | 103, 3, 4, 5, 70, 72, |
| | | | | 74, 93, 94, 95, 96, |
| | | | | 97 in |
| | | | | US20160009811 |
| PRP | VH | Identifier 42 in | VL | Identifier 39 ,41 in |
| | | US20160333114A1 | | US20160333114A1 |
| Lysyloxidase- | VH | Identifier 42, 44 in | VL | Identifier 43, 45 in |
| like 2 | | WO2011097513 | | WO2011097513 |
| PSMA | VH | Identifier 43 in | VL | Identifier 44 in |
| | | WO2016097231 | | WO2016097231; |
| | | | | Identifier 44 in |
| | | | | WO2016097231 |
| PDL2 | VH | Identifier 43, 44, 56, | VL | Identifier 47, 48, 49, |
| | | 46 in | | 50, 51 in |
| | | US20130291136 | | US20130291136 |
| Daclizumab | VH | Identifier 44, 46 in | VL | Identifier 43, 45 in |
| | | US20160333114A1 | | US20160333114A1 |
| CD20 | VH | Identifier 45 in | VL | Identifier 46 in |
| | | WO201697231; | | WO2016097231; |
| | | Identifier 11, 13, 14, | | Identifier 10, 12, 8 |
| | | 15, 16, 17, 18, 19, 20, | | in WO2017004091; |
| | | 21, 22, 23, 24, 25, 26, | | Identifier 51 in |
| | | 27, 28, 29, 30, 31, 32, | | US20160333114Al |
| | | 33, 7, 9 in | | |
| | | WO2017004091; | | |
| | | Identifier 26 in | | |
| | | US20170000900; | | |
| | | Identifier 54 in | | |
| | | US20160333114Al; | | |
| | | Identifier 25 in | | |
| | | US20170000900; | | |
| | | Identifier 24 in | | |
| | | US20170000900; | | |
| | | Identifier 23 in | | |
| | | US20170000900 | | |
| Klon43 | VH | Identifier 47 in | VL | Identifier 48 in |
| | | WO2016097231 | | WO2016097231 |
| MUC1 | VH | Identifier 5 in | VL | Identifier 7 in |
| | | US20160130357; | | US20160130357; |
| | | Identifier 2, 14 in | | Identifier 16, 7 in |
| | | WO2013023162; | | WO2013023162; |
| | | Identifier 15, 19, 23, | | Identifier 17, 21, 25, |
| | | 60, 64, 68 in | | 62, 66, 70 in |
| | | WO2015116753 | | WO2015116753 |
| CD4i | VH | Identifier 5 in | VL | Identifier 4 in |
| | | US20160194375Al | | US20160194375A1 |
| BAT1 | VH | Identifier 5, 6, 7, 8, 9 | VL | Identifier 1, 2, 3, 4 |
| | | in WO2013014668 | | in WO2013014668 |
| PRAME | VH | Identifier 50, 52, 54, | VL | Identifier 49, 51, 53, |
| | | 56, 58, 60, 62 in | | 55, 57, 59, 61 in |
| | | WO2016191246A2 | | WO2016191246A2 |
| CD19 | VH | Identifier 53, 55 in | VL | Identifier 27, 31 in |
| | | WO2016120216 | | WO2016168773 A3; |
| | | | | Identifier 49 in |
| | | | | WO2016187349A1; |
| | | | | Identifier 11 in |
| | | | | WO2016134284; |
| | | | | Identifier 194 in |
| | | | | US20140134142Al; |
| | | | | Identifier 54, 56 in |
| | | | | WO2016120216; |
| | | | | Identifier 13, 14, 15, |
| | | | | 16, 17, 186, 187, 188, |
| | | | | 189, 192, 196, 197, |
| | | | | 198, 199, 200, 201, |
| | | | | 202, 203, 204, 205, |
| | | | | 64, 66, 67, 68, 69, |
| | | | | 70, 71, 91 in |
| | | | | US20160152723; |
| | | | | Identifier 22 in |
| | | | | US20160039942; |
| | | | | 3361 Identifier 63 in |
| | | | | WO2016097231; |
| | | | | Identifier 3 in |
| | | | | US20160145337Al; |
| | | | | Identifier 112 in |
| | | | | US20160333114Al; |
| | | | | Identifier 114 in |
| | | | | US20160333114A1; |
| | | | | Identifier 13, 6 |
| | | | | US20160319020 |
| Notum | VH | Identifier 56, 331 in | VL | Identifier 332, 58 in |
| | | WO2012027723 | | WO2012027723 |
| NOTCH 1 | VH | Identifier 58 in | VL | Identifier 16, 20 in |
| | | US20160333114A1; | | WO2013074596; |
| | | Identifier 12 in | | Identifier 55, 57 in |
| | | WO2013074596 | | US20160333114Al |
| Osteonectin | VH | Identifier 58 in | VL | Identifier 59 in |
| | | WO2016112870 | | WO2016112870 |
| CD74 | VH | Identifier 6 in | VL | Identifier 25, 29, 31, |
| | | US20100284906Al; | | 35 in |
| | | Identifier 10, 11, 9 in | | US20130171064; |
| | | US20040115193Al; | | Identifier 12, 13, 14, |
| | | Identifier 23, 27, 30, | | 11, 4 in |
| | | 33 in | | US20040115193Al |
| | | US20130171064 | | |
| CD33 | vH | Identifier 65, 67, 69, | VL | Identifier 12, 14, 16, |
| | | 71, 77, 79, 81, 83, | | 18 in |
| | | 84 in | | WO2015150526A2; |
| | | WO2016120216; | | Identifier 66, 68, 70, |
| | | Identifier 11, 13, 15; | | 72, 78, 80, 82 in |
| | | 17 in | | WO2016120216; |
| | | WO2015150526A2; | | Identifier 66, 67, 68, |
| | | Identifier 57, 58, 59, | | 69, 70, 71, 72, 73, 74 |
| | | 60, 61, 62, 63, 64, 65 | | in WO2016014576 |
| | | in WO2016014576 | | |
| Rituximab | VH | Identifier 66 in | VL | Identifier 63, 65 in |
| | | US20160333114Al | | US20160333114Al |
| GAH | VH | Identifier 7 in | VL | Identifier 8 in |
| | | US20060057147A1 | | US20060057147A1 |
| Glyco epitope | VH | Identifier 7 in | VL | Identifier 10 in |
| and ErbBB I | | WO2012007167A1 | | WO2012007167A1 |
| Specific | | | | |
| CD3s | VH | Identifier 7 in | VL | Identifier 8 in |
| | | WO2014144722A2 | | WO2014144722A2 |
| IGFR1 | VH | Identifier 7 in | VL | Identifier 8 in |
| | | WO2015073575A2 | | WO2015073575A2 |
| IL13Ra2 | VH | Identifier 7, 8 in | — | — |
| | | WO2016123143 | | |
| N Glycan | VH | Identifier 7, 9 in | VL | Identifier 6, 8 in |
| | | US20160194375A1 | | US20160194375A1 N |
| Upar | VH | Identifier 72 in | VL | Identifier 71, 73 in |
| | | US20160333114Al | | US20160333114Al |
| CXCR4 | VH | Identifier 72, 73, 74, | VL | Identifier 76, 77, 78, |
| | | 75, 84 in | | 79, 80, 81, 82, 87, 88, |
| | | US20110020218 | | 90, 91, 92, 93 in |
| | | | | US20110020218 |
| Tie | VH | Identifier 723 in | VL | Identifier 724 in |
| | | US20060057138Al | | US20060057138Al |
| CEA | VH | Identifier 8 in | VL | Identifier 10, 38, 39, |
| | | US8287865 | | 7, 9 in US8287865 |
| Herl/her3 | VH | Identifier 8 of | VL | Identifier 4 of |
| | | WO2016073629 | | WO2016073629 |
| CD70 | VH | Identifier 81, 85, 89 in | VL | Identifier 83, 87, 91 |
| | | WO2015121454 | | in WO2015121454; |
| | | | | Identifier 83 in |
| | | | | WO2015121454; |
| | | | | Identifier 87 in |
| | | | | WO2015121454; |
| | | | | Identifier 91 in |
| | | | | WO2015121454 |
| leuko- | VH | Identifier 9 in | VL | Identifier 24 in |
| cytegenA | | WO2010065962 A2 | | WO2010065962 A2 |

[0122] In some embodiments, the antigen-binding moiety may comprise an scFv derived from an antibody or antibody fragment that binds to an antigen target such as those described in the cited publications, the contents of each publication are incorporated herein by reference in their entirety for all purposes (Table 2).

TABLE 2
Exemplary antigen-binding moieties comprising an scFv derived from
an antibody or antibody fragment that binds to an antigen target

| Antigen Target | Examples of Source |
|---|---|
| CEA | Identifier 1 in US20160303166A1; Identifier 22 in US20140242701A1 |
| GPC3 | Identifier 1 in WO2016049459; Identifier 12 in US20160208015A1 |
| CS1 | Identifier 1 of WO2016090369; Identifier 17 in WO2014179759A1 |
| VEGFR2 | Identifier 1, 2 in US20120213783 |
| TSLPR | Identifier 1, 2 in US20160311910A1; Identifier 1, 2 in WO2015084513 |
| B7H4 | Identifier 1, 2, 3, 4 in WO2013067492; Identifier 1 in U.S. Pat. No. 9,422,351B2 |
| CD276 | Identifier 10, 19, 28 in US20160053017 |
| GPRC5D | Identifier 100, 101, 102, 103, 104, 105, 106, 107, 108, 109, 110, 111, |
| | 112, 113, 114, 115, 116, 117, 118, 119, 120, 121, 122, 123, 301, 313, |
| | 325, 337, 349, 361, 373, 385 in WO2016090312 |
| WT1/HLA | Identifier 108, 113, 18, 36, 54, 72, 90 in WO2015070061 |
| bispecific | |
| CMet | Identifier 11, 12, 13, 14, 15, 16, 17, 18, 19, 2, 21, 22, 23, 25, 26, 27, 28, 3, |
| | 30, 31, 33, 34, 35, 36, 37, 38, 39, 4; 40, 41, 42, 43, 44, 48, 49, 5, 50, 51, 52, |
| | 53, 54, 55, 56, 57, 58, 6, 60, 7, 9, 29 in US20040166544; Identifier 26, 27, |
| | 28, 29, 30, 32 in US20150299326; Identifier 32 in US20130034559 |
| FcRL | Identifier 11, 15, 19, 23, 27, 31, 35, 39, 3, 43, 7, 594, 596, 598, 600, 602, |
| | 604, 606, 608, 610, 612, 614, 616, 618, 620, 622, 624, 626, 628, 630, 632, |
| | 634, 636, 638, 640, 642, 644, 646, 648, 652, 654, 656; 658, 660, 662, 664, |
| | 666, 668, 670, 672, 674, 676, 680, 682, 684, 686, 688, 690, 692, 694, 696, |
| | 700, 702, 704, 706, 708, 710, 712, 714, 716, 718, 720, 722, 724, 726, 728, |
| | 730, 732, 734, 736, 738, 740, 742, 744, 746, 748, 750, 752, 754, 756, 758, |
| | 760, 762, 764, 766, 768, 770, 772, 774, 776, 778, 780, 782, 784, 786, 788, |
| | 790, 792, 794, 796, 798, 800, 802, 804, 806, 808, 810, 812, 814, 816, 818, |
| | 820, 822, 824, 826, 828, 830, 832, 834, 836, 838, 840, 842, 844; 846, 848, |
| | 850, 852, 854, 856, 858, 860, 862, 864, 866, 868, 870, 874, 876, 878, 880, |
| | 882, 884, 886, 888, 890, 892, 894, 896, 650, 678 in WO2016090337 |
| EGFR | Identifier 11, 38, 41, 44, 47, 50, 53, 56, 59, 62, 65, 68, 71, 74, 77, 80, |
| | 83, 88, 91, 94 in WO2014130657 |
| Claudin | Identifier 11, 5, 7, 9 in WO2016073649A1; Identifier 17 in |
| | WO2014179759A1 |
| PSMA diabody | Identifier 12, 13, 14, 15 in WO2011069019 |
| TRBC1 | Identifier 13, 14, 15, 16, 17, 18, 19, 20, 21, 22, 3 in WO2015132598 |
| CD19/CD22 | Identifier 1303, 1307 in WO2016164731A2 |
| Bispecific | |
| CD46 | Identifier 1-42 in WO2016040683 |
| MUC1 | Identifier 15 in US20160130357 |
| MUC3 | Identifier 15 in US20160130357 |
| Folate receptor | Identifier 15 in US20170002072A1 |
| PDK1 | Identifier 15 in WO2016090365 |
| Folate receptor | Identifier 15, 23 in WO2012099973 |
| alpha | |
| BCMA | Identifier 152, 158, 176, 185, 188, 200, 212, 218, 224, 284, 290, 296, |
| | 302, 314, 326, 344, 129, 130, 131, 132, 133, 134, 135, 136, 138, 139, |
| | 140, 141, 142, 143, 144, 145, 146, 147, 148, 149, 263, 264, 265, 266, |
| | 271, 273, 39, 40, 41, 42, 43, 44, 45, 46, 47, 48, 49, 50, 51, 52, 53, 64, |
| | 129, 130, 131, 132, 133, 134, 135, 136, 137, 138, 139, 140, 141, 142, |
| | 143, 144, 145, 146, 147, 148, 149, 263, 264, 265, 266, 39, 40, 41, 42, |
| | 43, 44, 45, 46, 47, 48, 49, 50, 51, 52, 53 in WO2016014565; Identifier |
| | 214, 215, 216, 217, 218, 219, 220, 221, 222, 223, 224, 225, 226, 227, |
| | 228, 229, 230, 231, 232, 233, 234, 235, 236, 237, 238, 239, 240, 241, |
| | 242, 243, 244, 245, 246, 247, 248, 249, 251 in US20160311907A1 |
| CD123 | Identifier 157, 158, 159, 160, 184, 185, 186, 187, 188, 189, 190, 191, |
| | 192, 193, 194, 195, 196, 197, 198, 199, 200, 201, 202, 203, 204, 205, |
| | 206, 207, 208, 209, 210, 211, 212, 213, 214, 215, 478, 480, 483, 485 in |
| | WO2016028896; Identifier 36 in WO2015092024A2; Identifier 57 in |
| | WO2016115482A1; Identifier 36 in EP3083691A2; Identifier 157 in |
| | US20160311907A1 |
| CD124 | Identifier 158 in US20160311907A1 |
| CD125 | Identifier 159 in US20160311907A1 |
| CD5 | Identifier 16 in WO2016138491 |
| CD126 | Identifier 160 in US20160311907A1 |
| CD127 | Identifier 161 in US20160311907A1 |
| CD128 | Identifier 162 in US20160311907A1 |
| CD129 | Identifier 163 in US20160311907A1 |
| CD130 | Identifier 164 in US20160311907A1 |
| Claudin6 | Identifier 164 in WO2016115482A1 |
| CD131 | Identifier 165 in US20160311907A1 |
| Claudin7 | Identifier 165 in WO2016115482A1 |
| GCN4 | Identifier 165, 166, 167, 168, 169, 170 in WO2016168773 A3 |
| Claudin8 | Identifier 166 in WO2016115482A1 |
| VEGF | Identifier 168, 169, 170, 171, 172, 173, 174, 175 in US20160090427; |
| | Identifier 498, 500, 502, 504, 506, 508 in US20110177074A1 |
| MUC2 | Identifier 17 in US20160130357 |
| MUC4 | Identifier 17 in US20160130357 |
| CD44 | Identifier 17 in WO2016042461A1 |
| IL4 | Identifier 17, 16 in WO2009121847 |
| ALK | Identifier 17, 18, 19, 20, 21, 22, 23 in WO2015069922; Identifier 17, 18, 19, |
| | 20, 21, 22, 23, 24 in US20160280798A1; Identifier 24 in WO23015069922 |
| ESKAVT | Identifier 173 in WO2016115482A1 |
| GD2 | Identifier 19, 20, 21, in WO2016134284; Identifier 8 in WO2015132604 |
| PSMA | Identifier 19, 21, 30, 31, 34, 35 in WO2012145714 |
| TOSO | Identifier 2 in EP3098237A1 |
| CSPG4 | Identifier 2 in WO2015080981; Identifier 2 in EP3074025A1 |
| CLDN6 | Identifier 2 in WO2016150400 |
| Integrin bivalent | Identifier 2, 1 in WO2009070753 |
| CD30 | Identifier 20 in WO2016116035A1; Identifier 2 in US20160200824A1 |
| NYBR1 | Identifier 21 in US20160333422A1; Identifier 21, 18, 19 in WO2015112830 |
| CD37 | Identifier 21, 22 in US20170000900 |
| PDL1 nanobody | Identifier 22, 23, 24, 25, 26, 27 in US20110129458 |
| Radiation inducible | Identifier 22, 24 in WO2005042780A1 |
| neoantigen | |
| E7MC | Identifier 223, 224, 225, 226, 227, 228, 229, 230, 231, 232 in |
| | WO2016182957A1 |
| TRBC2 | Identifier 23, 24, 25, 26, 27, 28, 29, 30, 31, 32 in WO2015132598 |
| GPC4 | Identifier 24 in WO2016049459 |
| ERBB2 | Identifier 26, 27 in US20110059076A1; Identifier 1, 2 in U.S. Pat. No. 7,244,826 |
| CD33 | Identifier 262, 263, 264, 265, 266, 267, 268, 39, 40, 41, 42, 43, 44, 45, |
| | 46, 47 in WO2016014576; Identifier 37 in WO2015092024 A2; |
| | Identifier 37 in EP3083691A2; Identifier 153, 154, 155, 156, 157, 158, |
| | 159, 160, 161, 162, 163 in WO2016115482A1 |
| PDL2 nanobody | Identifier 28, 29, 30, 31, 32, 33 in US20110129458 |
| 6462 | |
| O-acetylated GD2 | Identifier 29, 31 in US20150140023 |
| ganglioside | |
| OX40 | Identifier 33 in US20150190506 |
| CD79b | Identifier 33 in US20160208021 |
| Human CD79b | Identifier 33 in WO2016112870 |
| CD33/CD3s | Identifier 33, 34, 84 in WO2014144722A2 |
| bispecifc | |
| RORI | Identifier 34 in EP3083691A2; Identifier 249, 250 251, 252, 253, 254, |
| | 255, 256, 257, 258, 259, 260, 261, 262, 263, 264, 265, 266, 267, 268 in |
| | US20160208018A1; Identifier 57 in EP3083671A1; Identifier 1, 2 in |
| | US20160304619A1; Identifier 34 in WO2015092024A2 |
| Human collagen | Identifier 34 in WO2016112870 |
| VII | |
| Trastuzumab | Identifier 35 in US20160208021; Identifier 35 in WO2016112870 |
| Rituximab | Identifier 36 in US20160208021; Identifier 36 in WO2016112870 |
| CD138 | Identifier 36 in WO2016130598A1 |
| Centuxiamb | Identifier 37 in WO2016112870; Identifier 37 in US20160208021 |
| Nivolumab | Identifier 38 in US20160208021; Identifier 38 in WO2016112870 |
| Ipilimumab | Identifier 39 in US20160208021; Identifier 39 in WO2016112870 |
| PD1 | Identifier 39, 40, 41, 42, 43, 44, 45, 46, 47, 48, 49, 50, 51, 52, 53, 54, |
| | 55, 56, 57, 58, 59, 60, 61 in US20160311917A1 |
| CLL1 | Identifier 39, 40, 41, 42, 43, 44, 45, 46, 48, 49, 50, 51 in WO2016014535; |
| | Identifier 200, 201, 202, 203, 204, 205, 206, 207, 208, 209, 210, 211, |
| | 212, 213 in US20160311907A1 |
| CLDN7 | Identifier 4 in WO2016150400 |
| Ranibizuman | Identifier 40 in US20160208021; Identifier 40 in WO2016112870 |
| Adalimunab | Identifier 41 in US20160208021; Identifier 41 in WO2016112870 |
| Teplizumab | Identifier 42 in US20160208021 |
| (mutated) | |
| Teplizumab | Identifier 42 in WO2016112870 |
| CD3 | Identifier 46, 47 in WO2015153912A1 |
| EGFR VIII | Identifier 5 in US20140037628; Identifier 174 in US20160311907A1; |
| | Identifier 38 in U.S. Pat. No. 9,394,368B2; Identifier 5 in US20160200819A1 |
| CD22 | Identifier 5, 6 in WO2013059593; Identifier 9 in US20150299317; |
| | Identifier 131, 132, 133, 134, 135, 136, 137, 138, 139, 140, 203, 209, |
| | 215, 221, 227, 232, 238, 244, 250, 256, 262, 268, 274, 280, 286, 292, |
| | 298, 304, 310, 316, 322, 328, 334, 340, 346, 353, 358, 364, 370, 376, |
| | 383, 388, 394, 400, 406, 412, 418, 423 in WO2016164731A2 |
| CD19 | Identifier 53, 54, 37 in EP3083671A1; Identifier 1, 10, 11, 12, 2 in |
| | WO2015157252; Identifier 10, 2, 206, 207, 208, 209, 210, 211, 213, 214, |
| | 215, 216, 217, 218, 219, 220, 221, 222, 223, 224, 225, 4, 45, 47, 49, 51, |
| | 53, 55, 57, 51, 53, 55, 57, 59, 6, 8, 87 in WO2016033570; Identifier 3, 4, 5, |
| | 59, 6, 7, 8, 9 in WO2015157252; 5754 Identifier 5 in WO2015155341A1; |
| | Identifier 7 in WO2014184143; Identifier 9 in WO2016139487; Identifier |
| | 10, 2, 206, 207, 208, 209, 210, 211, 212, 213, 214, 215, 216, 217, 218, 219, |
| | 220, 221, 222, 223, 224, 225, 4, 45, 47, 49, 51, 53, 55, 57, 59, 6, 8, 87, 89 in |
| | US20160152723; Identifier 32, 35, 38 in EP3083691A2; Identifier 174 in |
| | WO2016115482A1; Identifier 20 in WO2012079000; Identifier 32, 33, 35, |
| | 38 in WO2015092024A2; Identifier 39, 40, 41, 42, 43, 44, 45, 46, 47, 48, |
| | 49, 50, 51 in WO2016109410; Identifier 5, 6 in WO2015155341A1; |
| | Identifier 7, 9 in US20160145337A1; Identifier 20 in U.S. Pat. No. 9,499,629B2; |
| | Identifier 73 in WO2016164580; Identifier 10, 2, 206, 207, 209, 210, |
| | 216, 218, 219, 220, 221, 222, 223, 224, 225, 4, 45, 47, 49, 51, 53, 55, 57, |
| | 59, 6, 8, 87, 89 in US20160152723; Identifier 5 in WO2016055551 |
| END 0180 | Identifier 6 in WO2013098813 |
| CLDN8 | Identifier 6 in WO2016150400 |
| PRAME | Identifier 63, 64, 65, 66, 67, 68, 69 in WO2016191246A2 |
| CD20 | Identifier 691 in WO2016164731A100; Identifier 692 in |
| | WO2016164731A101; Identifier 693 in WO2016164731A102; Identifier |
| | 694 in WO2016164731A103; Identifier 695 in WO2016164731A104; |
| | Identifier 696 in WO2016164731A105; Identifier 175 in WO2016115482A1 |
| Mesothelin | Identifier 7 WO2015188141; Identifier NO 47, 46, 57, 48, 49, 50, 51, |
| | 53, 54, 55, 56, 58, 59, 62, 64, 65, 66, 67, 68, 69, 70, 52, 60, 61, 63 in |
| | WO2016090034; Identifier 10, 11, 12 in WO2013142034; Identifier 11 |
| | in WO2013063419 |
| CCR4 | Identifier 7, 9 in WO2015191997 |
| Mec/CD3s | Identifier 78 in WO2014144722A2 |
| bispecific | |
| Activated alpha | Identifier 8, 2, 4 in US20090117096A1 |
| v beta 3 | |
| RAS | Identifier 81 in WO2016154047 |
| CXCR4 | Identifier 83, 85, 86, 89 in US20110020218 |
| HER2/CD3 | Identifier 9 in WO2014144722 A2 |
| FOLR1/CD3s | Identifier 90 in WO2014144722A2 |
| bispecific | |
| B7H3 | Identifier 99, 100, 101, 102, 103, 104, 102, 17, 18, 19, 20, 21, 22, 23, 24, 25, |
| | 26, 27, 87, 88, 89, 90, 91, 92, 94, 95, 96, 97, 98 in WO2016033225 |

[0123] In some embodiments, the antigen-binding moiety may comprise an antigen-binding moiety derived from a CAR that binds to an antigen target, such as those described in the cited publications, the contents of each publication are incorporated herein by reference in their entirety for all purposes (Table 3).

TABLE 3
Exemplary antigen-binding moieties comprising an antigen-binding
moiety derived from a CAR that binds to an antigen target

| Antigen Target | Examples of Source |
|---|---|
| CAR or gate (DC19 | Identifier 1 in US20160296562 |
| or DC33) | |
| CD19 or CD33 | Identifier 1 in WO2015075468 which recognizes CD19 OR CD33 |
| CD19/IL13 bispecific | Identifier 10 in US20160340649A1 |
| CAT19, campana | Identifier 10 in WO2016139487 |
| architecture | |
| CD2 | Identifier 10, 11 in WO2016138491 |
| CD70 | Identifier 100, 93, 94, 96, 101, 95, 97, 98 in WO2015121454 |
| VNAR | Identifier 105, 106, 107, 108, 109, 110 in US20160333094A1 |
| FcRL5 | Identifier 11 in US20170008963A1 |
| CAT19 CAR with | Identifier 11 in WO2016139487 |
| OX40 zeta endodomain | |
| Folate receptor | Identifier 12 in US20170008963A1 |
| GD2 | Identifier 12 in U.S. Pat. No. 9,446,105B2; Identifier 273, 274 in |
| | WO2016168773A3; Identifier 26, 27, 28, 29, 30, 31, 32, 33, 34, |
| | 35, 36, 37 in WO2015132604; WO2016134284 (no Identifier) |
| CD19 | Identifier 12 in U.S. Pat. No. 9,499,629B2; Identifier 24 in US20160333108A1; |
| | Identifier 25, 29 in US20160333108A1; Identifier 27 in |
| | US20160333108A1; Identifier 1 in EP2997134A4; Identifier 19, 20 |
| | in EP3071687A1; Identifier 181 in WO2016168773A3; Identifier 2 |
| | in WO2015157399A9; Identifier 56, 62 in WO2016174409A1; |
| | Identifier 145, 293, 294, 295, 296, 297, 298 in WO2016179319A1; |
| | Identifier 73 in WO2013176915A1; Identifier 73 in |
| | WO2013176916A1; Identifier 73 in US20130315884A1; Identifier |
| | 73 in US20140134142A1; Identifier 73 in US20150017136A1; |
| | Identifier 73 in US20150203817A1; Identifier 73 in |
| | US20160120905A1; Identifier 73 in US20160120906A1; Identifier |
| | 8, 5 in WO2015124715; Identifier 73 in WO2014184744; Identifier |
| | 73 in WO2014184741; Identifier 14, 15 in US20160145337A1; |
| | Identifier 14, 15 in WO2014184143; Identifier 15, 16 in |
| | WO2015075175; Identifier 16 in US20160145337A1; Identifier 16 in |
| | WO2014184143; Identifier 12 in WO2012079000; Identifier 31, 32, 33, |
| | 34, 35, 36, 37, 38, 39, 40, 41, 42, 58 in WO2016164580; Identifier 14, |
| | 15 in US20160296563A1; Identifier 31, 32, 33, 34, 35, 36, 37, 38, 39, |
| | 40, 41, 42 in WO2015157252; Identifier 14, 15 in WO2016139487; |
| | Identifier 53, 54, 55, 56, 57, 58 in US20160250258A1; Identifier 1, 2, |
| | 3, 4, 5, 6, 7, 8, 9, 10, 11, 12, 13 in WO2015187528; Identifier 31, 32, |
| | 33, 34, 35, 36, 37, 38, 39, 40, 41, 42, 58 in WO2015157252; Identifier |
| | 31, 32, 33, 34, 35, 36, 37, 38, 39, 40, 41, 42 in WO2014153270; |
| | WO2016134284 (no Identifier); Identifier 13 in WO2016139487 |
| CD3 | Identifier 12 in WO2016138491 |
| CAT19 CAR with | Identifier 12 in WO2016139487 |
| CD28 zeta endodomain | |
| FRa | Identifier 13, 14 in US20120213783 |
| CD4 | Identifier 13, 14 in WO2016138491 |
| FR beta | Identifier 13, 22 in U.S. Pat. No. 9,402,865B2; Identifier 2, 4, 6 in U.S. Pat. No. 9,446,105B2 |
| CD19/CD20 | Identifier 1308 in WO2016164731A2; Identifier 2, 8, 11 in |
| bispecific | U.S. Pat. No. 9,447,194B2 |
| CLL1 | Identifier 148 in WO2016179319A1; Identifier 35, 36, 37, 38, 39, |
| | 40, 41, 42, 43, 44, 45, 46, 47, 48, 49, 50, 51, 52, 53, 54, 55, 56, 57, |
| | 58, 59, 60, 61, 62, 63, 64, 65, 66, 67, 68, 69, 70, 71, 72, 73, 74, 75, |
| | 76, 77, 78, 79, 80, 81, 82, 83, 84, 85, 86, 87, 88, 89, 90, 91, 92, 93, |
| | 94, 95, 96, 97, 98, 99, 100, 101, 102, 103, 104, 105, 106, 107, 108, |
| | 109, 110, 111, 112 in WO2016120218; Identifier 91, 92, 93, 94, |
| | 95, 96, 97, 98, 99, 100, 101, 102, 103, 197 in WO2016014535 |
| CD5 | Identifier 15, 13 in WO2016138491 |
| EGFR vIII | Identifier 15, 16, 17, 18, 24, 25, 26, 27 in WO2016016341; |
| | Identifier 5, 10, 12, 8, 31, 30, 3 in US20160311907A1; Identifier |
| | 10 in US20160200819A1; Identifier 43, 49, 55, 61, 67, 73, 79, 85, |
| | 90, 96 in U.S. Pat. No. 9,394,368B2; Identifier 49, 55, 61, 67, 73, 79, 85, 90, |
| | 2, 1 in US20170008963A1; Identifier 10, 11 in US20140037628 |
| CD7 | Identifier 17 in WO2016138491 |
| CD52 | Identifier 18 in WO2016138491 |
| BCMA | Identifier 180, 162, 168, 174, 144, 150, 186, 192, 198, 204, 210, 156, |
| | 216, 222, 228, 234, 240, 246, 252, 258, 264, 270, 276 330, 282, 300, |
| | 306, 336, 354, 288, 312, 294, 342, 324, 318, 348 in WO2016168595A1; |
| | Identifier 48, 49, 50, 51, 52, 53, 54, 55, 56, 57, 58, 59, 19, 20, 21, 22, |
| | 23, 24, 25, 26, 27, 28, 29, 30, 31, 32, 33, 34, 35, 36, 37, 38, 39, 40, 41, |
| | 42 in WO2015158671A1; Identifier 124, 114, 115, 116, 117, 118, 119, |
| | 120, 121, 122, 123, 125, 126, 127, 128, 234, 235, 236, 237, 238, 239, |
| | 240, 241, 242, 243, 244, 245, 246, 247, 248, 249, 250, 251, 252, 253, |
| | 254, 267, 268, 269, 270 in WO2016014565; Identifier 1, 2, 3, 4, 5, 20 |
| | in WO2015052538; Identifier 1, 2, 3, 4, 5, 6 in US20160237139A1; |
| | Identifier 9 in WO2016094304 A3; Identifier 4, 5, 6, 8, 9, 10, 11, 12 in |
| | WO2013154760; Identifier 15, 16, 17, 18, 19, 20, 21, 22, 23, 24, 25, |
| | 26, 27, 28, 29, 71, 73 in WO2016014789; Identifier 125, 126, 127, |
| | 128, 129, 130, 131, 132, 133, 134, 135, 136, 137, 138, 139, 140, 141, |
| | 145, 146, 147, 148, 149, 150 in WO2016120216; Identifier 102, 106, |
| | 107, 108, 109, 110, 111, 112, 129, 130, 131, 132, 133, 134, 135, 136, |
| | 113, 114, 115, 116, 117, 118, 101, 100, 137, 119, 120, 121, 122, 123, |
| | 124, 125, 126, 127, 128, 103, 104, 105, 213 in WO2016097231 |
| Tan | Identifier 19 in US20160311907A1 recognizes CD19 AND CD33 |
| | using a CD45 phosphatase; Identifier 5 in WO2016026742A1 |
| | recognizes CD19 AND CD33 using a CD148 phosphatase; Identifier 6 |
| | in WO2016026742A1 which recognizes CD19 AND NOT CD33 and is |
| | based on an ITIM containing endodomain from LAIR1; Identifier 3 in |
| | WO2015075468 which recognizes CD19 AND NOT CD33 and |
| | PTPN6 phosphatase; Identifier 2 in WO2015075468 which recognizes |
| | CD19 AND NOT CD33 and recruits a PTPN6/CD148 fusion protein |
| | to an ITIM containing endodomain |
| GD3 | Identifier 19 in WO2016185035A1; Identifier 20, 21, 22, 23, 24, |
| | 25, 26 in WO2016185035A1; WO2016134284 (no Identifier) |
| CAR and gate | Identifier 2 in US20160296562 |
| (CD19 and CD33) | |
| CD148 phosphatase | |
| CD30 | Identifier 20 in WO2016008973A1; Identifier 1 in WO2016116035A1; |
| | WO2016134284 (no Identifier); Identifier 2 in WO2016008973 |
| CD44 | Identifier 21, 22, 23, 24, 25, 26, 27, 28, 31, 32, 33, 34, 35 in |
| | WO2016042461A1 |
| ROR1 | Identifier 216, 217, 215 in WO2016097231; Identifier 79, 80, 81, 82, |
| | 83, 84, 85, 86, 87, 88, 89, 90, 91, 92, 93, 94, 95, 96, 103, 104, 105, 106, |
| | 107, 108, 109, 110, 111, 112, 113, 114, 115, 116, 117, 118, 119, 120, |
| | 127, 128, 129, 130, 131,132, 133, 134, 1335, 136, 137, 138, 97, 98, 99, |
| | 100, 101, 102, 121, 122, 123, 124, 125, 126 in WO2016016344A1; |
| | Identifier 386, 387, 388, 389, 390, 391, |
| FR | Identifier 22 in US20170002072A1 |
| CLDN6 | Identifier 22, 23, 24 in WO2016150400 |
| PD1 | Identifier 23 in WO2016014565; Identifier 26 in WO2015142675 |
| Her1/Her3 bispecific | Identifier 23, 24 in US20160215261A1 |
| HER2 | Identifier 25 in US20160215261A1; Identifier 9, 10 of |
| | WO2016073629; Identifier 17, 28, 98, 110 in US20160333114A1; |
| | Identifier 271, 272 in WO2016168773A3; Identifier 5 in |
| | WO2016168769A1 |
| CD20 | Identifier 25 in WO2015157399A9; Identifier 177, 181, 182, 183, |
| | 184, 185, 186, 187, 205, 206, 207, 208, 209, 210, 211, 188, 189, |
| | 190, 191, 192, 193, 176, 212, 194, 195, 196, 197, 198, 199, 200, |
| | 201, 202, 203, 178, 179, 180 in WO2016097231 |
| P5A | Identifier 26, 29, 60 in US20160333422A1 |
| GFR alpha | Identifier 27 in WO2016185035A1 |
| GPC3 | Identifier 28, 29 in WO2016185035A1; Identifier 3, 27, 10, 29, 14, 30, |
| | 31, 18, 33 in WO2016049459; Identifier 22 in US20160215261A1 |
| CD22/CD19 | Identifier 29, 30 in WO2016149578; Identifier 1304 in |
| bispecific | WO2016164731A2 |
| CAR and gate | Identifier 3 in US20160296562 |
| (CD19 or CD33) | |
| CD45 phosphatase | |
| EGFR | Identifier 3, 2in WO2014130657; Identifier 36, 37, 38, 39, 35 in |
| | US20140242701 A; Identifier 43, 96, 49, 55, 61, 67, 73, 79, 85, |
| | 90, 1 in WO2014130657 |
| IL13 | Identifier 30, 31, 32 in WO2016120217 |
| Acid/base leucine | Identifier 34, 35 in WO2016124930 |
| zipper | |
| P5AC1 | Identifier 343, 344, 345, 346 in US20160297884A1 |
| P5AC16 | Identifier 347, 396, 348 in US20160297884A1 |
| P6AP | Identifier 349, 350, 351 in US20160297884A1 |
| PC1C12 | Identifier 352, 353, 354 in US20160297884A1 |
| PD1 | Identifier 355, 356, 357 in US20160297884A1; Identifier 119 in |
| | WO2014153270; Identifier 121 in WO2014153270; Identifier 22, |
| | 24, 63, 64, 65, 66, 67, 68, 69, 70, 71, 72, 73, 74, 75, 76, 77, 78, 79, |
| | 80, 81, 82, 83, 84, 85, 86 in US20160311917A1; Identifier 26, 39 |
| | in WO2016172537A1; Identifier 40 in US20160311907A1; |
| | Identifier 121, 119 in WO2015157252; Identifier 24 in |
| | WO2016014565; Identifier 22 in WO2016014565 |
| COM22 | Identifier 358, 359, 360 in US20160297884A1 |
| DDD1/AD1-based | Identifier 36 in WO2016124930 |
| zip | |
| PCI | Identifier 361, 362, 363 in US20160297884A1 |
| P6DY | Identifier 364, 365, 366 in US20160297884A1 |
| DDD1/AD1 zip | Identifier 37 in WO2016124930 |
| CD22 | Identifier 380, 204, 260, 266, 272, 278, 284, 290, 296, 302, 308, |
| | 341, 213, 320, 326, 332, 338, 347, 350, 356, 362, 368, 374, 219, |
| | 386, 392, 398, 404, 410, 416, 421, 427, 225, 230, 1109, 236, 242, |
| | 248, 254 in WO2016164731A2; Identifier 15, 16, 17, 18, 19, 20, |
| | 32 in WO2013059593; Identifier 22, 23, 24 in US20150299317 |
| PSMA | Identifier 39 in WO2015142675; Identifier 28, 29 in |
| | US20160311907A1; Identifier 140, 144, 145, 146, 147, 148, 149, |
| | 150, 167, 168, 169, 170, 171, 172, 173, 174, 151, 152, 153, 154, |
| | 155, 156, 139, 138, 175, 157, 158, 159, 160, 161, 162, 163, 164, |
| | 165, 166, 141, 142, 143, 214 in WO2016097231 |
| CD276 | Identifier 39, 40, 41, 42, 43, 44, 45, 46, 47, 122, 123, 124, 125, |
| | 126, 127, 128, 129, 130 in US20160053017 |
| SNAP | Identifier 395 in WO2016187216A1 |
| SSEA4 | Identifier 396, 397 in WO2016187216A1 |
| CEA | Identifier 4 in WO2016008973A1; Identifier 29, 30 in |
| | US20140242701A |
| CAR and not gate | Identifier 4, 5 in US20160296562 |
| (CD19 and not CD33) | |
| IL13Ra2specific | Identifier 4, 5, 6 in WO2016089916A1; Identifier 47, 49 in |
| | WO2016123143; Identifier 51, 53, 55 in WO2016123143; |
| | Identifier 1, 31, 32, 33, 34, 35, 36, 37, 38, 39, 40, 41, 42, 43, 44, |
| | 45 in US20160340649A1 |
| TSLPR | Identifier 40, 41, 42 in WO2016034666A1; Identifier 39, 40, 41, |
| | 42, 43, 44, 45, 46 in WO2015084513; Identifier 39, 40, 41, 42, 43 |
| | in US20160311910A1 |
| CAR and gate | Identifier 41 in US20160296562 |
| (CD19 and GD2) | |
| CAR and gate | Identifier 43 in US20160296562 |
| (CD19 and CD5) | |
| ALK | Identifier 43, 44, 45, 46, 47, 48, 49, 50, 51, 52, 53, 54, 55, 56, 57, 58, |
| | 59, 60, 61, 62, 63, 64, 65, 66, 67, 68, 69, 70, 71, 72, 73, 74, 75, 76, 77, |
| | 78, 79, 80, 81, 82, 84, 85, 86, 87, 88, 89, 90 in WO2015069922 |
| VEGFR2 | Identifier 44, 45, 46 in US20160311910A1; Identifier 10, 11, 12 in |
| | US20120213783 |
| CAR and gate (CD19 | Identifier 45 in US20160296562 |
| and EGFR VIII) | |
| KMA | Identifier 46 in US20160340649A1 |
| Mesothelin | Identifier 47, 48 in US20160340649A1; Identifier 48 in |
| | US20160340649A1; Identifier 27 in WO2016172703A2; Identifier |
| | 18, 19, 20, 21, 22, 23 in WO2013142034; Identifier 3 in |
| | WO2013067492 |
| CAR and not gate 1 | Identifier 48 in US20160296562 |
| HIV Env | Identifier 48, 49 in WO2016168766A1; Identifier 4 in |
| | EP2997134A4; Identifier 7, 9, 47, 49 in WO2015077789 |
| CD33 | Identifier 48, 49, 50, 51, 52, 53, 54, 55, 83 in WO2016014576; |
| | Identifier 19, 20, 21, 22, 23, 24, 25, 26, 27, 28, 29, 30, 31, 32, 33, 34, |
| | 35, 36, 37, 38, 39, 40, 41, 42, 48, 49, 50, 51, 52, 53, 54, 55, 56, 57, 58, |
| | 59, 60, 61, 62, 63, 64, 65, 66, 67, 68, 69, 70, 71 in WO2015150526A2 |
| CAR and not gate 2 | Identifier 49 in US20160296562 |
| CD435 | Identifier 5 in EP3074419A2 |
| TOSO | Identifier 5, 4 in WO2015075468 |
| MUC1 | Identifier 5, 7 in WO2013063419; Identifier 51 in US20160340406A1; |
| | Identifier 30, 32, 34 in US20160130357; Identifier 295, 298, 301, 304, |
| | 307, 607, 609, 611, 613 in WO2016130726 |
| CAR and not gate 3 | Identifier 50 in US20160296562 |
| CD8 stalk APRIL | Identifier 51 in US20160296562A1 |
| HSP70 | Identifier 51, 53, 5 in WO2015077789; Identifier 21, 22, 23, 24, |
| | 25, 26, 27, 28, 29 in WO2016120217 |
| APRIL-based CAR | Identifier 53 in US20160296562A1; Identifier 52 in US20160296562A1 |
| CS1 | Identifier 55, 57, 60, 54, 56, 48, 49, 50, 51, 52, 53, 58, 59, 61, 62 |
| | in WO2015121454; Identifier 28 in WO2014179759A1 |
| CAR and not gate | Identifier 6 in US20160296562A1 |
| (CD19 and not CD33) | |
| Trophoblast | Identifier 6 in WO2015075468; Identifier 4 in |
| Glycoprotein 5T4 | US20160347854A1; Identifier 4 in EP3098237A1; Identifier 19, |
| | 20, 21, 22, 23, 24, 25, 26, 27, 28, 29, 30, 31, 32, 33, 34, 35, 36, 37, |
| | 38, 39 in WO2016034666A1 |
| HERVK | Identifier 6 in WO2016168769A1 |
| NCAR with RQR82 | Identifier 615 in WO2016130726 |
| ACD 19 | |
| NYBR1 | Identifier 617, 619 in WO2016130726; Identifier 218 in |
| | WO2016097231; Identifier 26, 29, 60 in WO2015112830; |
| | Identifier 1 in US20160333422A1 |
| CD123 | Identifier 69 in WO2016142532; Identifier 23, 24, 25, 26, 27, 28, 29, |
| | 30, 31, 32, 33, 34, 35, 36, 37, 38, 39, 40, 41, 42, 44, 45, 46, 47, 48 in |
| | WO2015140268A1; Identifier 9, 10, 11, 12 in US20140271582; |
| | Identifier 56, 57, 58, 59, 60, 61 in WO2016097231; Identifier 98, 99, |
| | 100, 101, 125, 126, 127, 128, 129, 130, 131, 132, 133, 134, 135, 136, |
| | 137, 138, 139, 140, 141, 142, 143, 144, 145, 146, 147, 148, 149, 150, |
| | 151, 152, 153, 154, 155, 156 in WO2016028896; Identifier 31, 32, 33, |
| | 34, 35, 36, 37, 38, 39, 40, 41, 42, 43, 44, 45, 46, 47, 48, 49, 50, 51, 52, |
| | 53, 54, 55, 56, 57, 58, 59, 60, 61, 62, 63, 64, 65, 66, 67, 68, 69, 70, 71, |
| | 72, 73, 74, 75, 76, 77, 78, 79, 80, 81, 82, 83, 84, 85, 86, 87, 88, 89, 90, |
| | 91, 92, 93, 94, 95, 96, 97, 98, 99, 100, 101, 102, 103, 104, 105, 106, |
| | 107, 108, 109, 110, 111, 112, 113, 114, 115, 116, 117, 118, 119, 120, |
| | 121, 122, 123, 124, 125, 126, 127, 128, 129, 130, 131, 132, 133, 134, |
| | 135, 136, 137, 138, 139, 140, 141, 142, 143, 144, 145, 146, 147, 148, |
| | 149, 150, 151, 152, 153, 154, 155, 156, 157, 158, 159, 160, 172, 173, |
| | 174, 175, 176, 177, 178, 179, 180, 181, 182, 183, 184, 185, 186, 187, |
| | 188, 189, 190, 191, 193, 194, 195, 196, 197 in WO2016120220; |
| | Identifier 1, 2, 3, 4, 5, 6, 7, 8, 9, 10, 142 in WO2016120216 |
| CD410 | Identifier 7 in EP3074419A2 |
| CD38 | Identifier 70, 71, 72, 64, 65, 66, 67, 68, 69 in WO2016097231; |
| | Identifier 35, 36, 37 in WO2015121454 |
| GCN4 | Identifier 8, 10 in U.S. Pat. No. 9,446,105B2 |
| CD4-DDY3 | Identifier 9 in EP3074419A2 |
| Fra | Identifier 959 in WO2016090337; Identifier 13 in US20170002072A1 |
| CD70 | Identifier 99 in WO2015121454 |

[0124] In some embodiments, the antigen-binding moiety is a single-chain Fv (scFv). In some embodiments, the scFv comprises a linker between the VH and VL. Non-limiting examples of the linker sequence that may be used in the scFvs described herein include, GGGGSGGGGSGGGGS ((G4S) 3; SEQ ID NO: 12), GGGGS (SEQ ID NO: 15), GGGGSGGGGS ((G4S) 2; SEQ ID NO: 17), GGGGSGGGGSGGGGSGGGGS ((G4S) 4; SEQ ID NO: 18), KESGSVSSEQLAQFRSLD (SEQ ID NO: 19), EGKSSGSGSESKST (SEQ ID NO: 20), EGKSSGSGSESKSTQ (SEQ ID NO: 21), GSTSGSGKSSEGKG (SEQ ID NO: 22), SSADDAKKDDAKKDDAKKDDAKKDG (SEQ ID NO: 23), EGKSSGSGSESKVD (SEQ ID NO: 24), or ESGSVSSEELAFRSLD (SEQ ID NO: 25), or SGGGGSGGGGSGGGGS ((SG4)3 linker; SEQ ID NO: 104)) or a functional variant thereof. Additional linkers include those described in, e.g., Whitlow and Filpula, Methods, Volume 2, Issue 2, April 1991, Pages 97-105, the content of which is incorporated herein by reference in its entirety.

[0125] In some embodiments, the linker sequence comprises the amino acid sequence GGGGSGGGGSGGGGS (SEQ ID NO: 12), or a variant thereof having at least 50, at least 55, at least 60, at least 65, at least 70, at least 75, at least 80, at least 85, at least 90, at least 95, at least 96, at least 97, at least 98 or at least 99%, sequence identity with SEQ ID NO: 12. In certain embodiments, the nucleotide sequence that encodes the linker sequence comprises the nucleotide sequence that encodes the amino acid sequence of SEQ ID NO: 12, or a variant thereof having at least 50, at least 55, at least 60, at least 65, at least 70, at least 75, at least 80, at least 85, at least 90, at least 95, at least 96, at least 97, at least 98 or at least 99%, sequence identity with SEQ ID NO: 12. In certain embodiments, the nucleotide sequence that encodes the linker sequence comprises the nucleotide sequence set forth in SEQ ID NO: 13, 14 or 101, or a nucleotide sequence having at least 50, at least 55, at least 60, at least 65, at least 70, at least 75, at least 80, at least 85, at least 90, at least 95, at least 96, at least 97, at least 98 or at least 99%, sequence identity with SEQ ID NO: 13, 14, or 101. In certain embodiments, the linker sequence comprises the amino acid sequence set forth in SEQ ID NO: 12. In certain embodiments, the nucleotide sequence that encodes the linker sequence comprises the nucleotide sequence set forth in SEQ ID NO: 13, 14, or 101.

[0126] In some embodiments, the linker sequence comprises the amino acid sequence SGGGGSGGGGSGGGGS (SEQ ID NO: 104), or a variant thereof having at least 50, at least 55, at least 60, at least 65, at least 70, at least 75, at least 80, at least 85, at least 90, at least 95, at least 96, at least 97, at least 98 or at least 99%, sequence identity with SEQ ID NO: 104. In certain embodiments, the nucleotide sequence that encodes the linker sequence comprises the nucleotide sequence that encodes the amino acid sequence of SEQ ID NO: 104, or a variant thereof having at least 50, at least 55, at least 60, at least 65, at least 70, at least 75, at least 80, at least 85, at least 90, at least 95, at least 96, at least 97, at least 98 or at least 99%, sequence identity with SEQ ID NO: 104. In certain embodiments, the nucleotide sequence that encodes the linker sequence comprises the nucleotide sequence set forth in SEQ ID NO: 105, or a nucleotide sequence having at least 50, at least 55, at least 60, at least 65, at least 70, at least 75, at least 80, at least 85, at least 90, at least 95, at least 96, at least 97, at least 98 or at least 99%, sequence identity with SEQ ID NO: 105. In certain embodiments, the linker sequence comprises the amino acid sequence set forth in SEQ ID NO: 104. In certain embodiments, the nucleotide sequence that encodes the linker sequence comprises the nucleotide sequence set forth in SEQ ID NO: 105.

[0127] In certain embodiments, the antigen-binding moiety comprises a polypeptide or functional variant thereof that binds to EphA2. In certain embodiments, the antigen-binding moiety is a single chain variable fragment (scFv) that binds to a EphA2. In some embodiments, the anti-EphA2 scFv is derived from an mAb specific for the EphA2, or a functional variant thereof.

[0128] In some embodiments, EphA2 scFv comprises a heavy chain variable domain (VH) comprising the amino acid sequence set forth in SEQ ID NO: 94, or a variant thereof having at least 50, at least 55, at least 60, at least 65, at least 70, at least 75, at least 80, at least 85, at least 90, at least 95, at least 96, at least 97, at least 98 or at least 99%, sequence identity with SEQ ID NO: 94. In certain embodiments, the nucleotide sequence that encodes the VH of EphA2 scFv comprises the nucleotide sequence that encodes the amino acid sequence of SEQ ID NO: 94, or a variant thereof having at least 50, at least 55, at least 60, at least 65, at least 70, at least 75, at least 80, at least 85, at least 90, at least 95, at least 96, at least 97, at least 98 or at least 99%, sequence identity with SEQ ID NO: 94. In certain embodiments, the nucleotide sequence that encodes the VH of EphA2 scFv comprises the nucleotide sequence set forth in SEQ ID NO: 95, or a nucleotide sequence having at least 50, at least 55, at least 60, at least 65, at least 70, at least 75, at least 80, at least 85, at least 90, at least 95, at least 96, at least 97, at least 98 or at least 99%, sequence identity with SEQ ID NO: 95. In certain embodiments, the VH of EphA2 scFv comprises the amino acid sequence set forth in SEQ ID NO: 94. In certain embodiments, the nucleotide sequence that encodes the VH of EphA2 scFv comprises the nucleotide sequence set forth in SEQ ID NO: 95.

[0129] In some embodiments, EphA2 scFv comprises a light chain variable domain (VL) comprising the amino acid sequence set forth in SEQ ID NO: 96, or a variant thereof having at least 50, at least 55, at least 60, at least 65, at least 70, at least 75, at least 80, at least 85, at least 90, at least 95, at least 96, at least 97, at least 98 or at least 99%, sequence identity with SEQ ID NO: 96. In certain embodiments, the nucleotide sequence that encodes the VL of EphA2 scFv comprises the nucleotide sequence that encodes the amino acid sequence of SEQ ID NO: 96, or a variant thereof having at least 50, at least 55, at least 60, at least 65, at least 70, at least 75, at least 80, at least 85, at least 90, at least 95, at least 96, at least 97, at least 98 or at least 99%, sequence identity with SEQ ID NO: 96. In certain embodiments, the nucleotide sequence that encodes the VL of EphA2 scFv comprises the nucleotide sequence set forth in SEQ ID NO: 97, or a nucleotide sequence having at least 50, at least 55, at least 60, at least 65, at least 70, at least 75, at least 80, at least 85, at least 90, at least 95, at least 96, at least 97, at least 98 or at least 99%, sequence identity with SEQ ID NO: 97. In certain embodiments, the VL of EphA2 scFv comprises the amino acid sequence set forth in SEQ ID NO: 96. In certain embodiments, the nucleotide sequence that encodes the VL of EphA2 scFv comprises the nucleotide sequence set forth in SEQ ID NO: 97.

[0130] In some embodiments, EphA2 scFv comprises the amino acid sequence set forth in SEQ ID NO: 10, or a variant thereof having at least 50, at least 55, at least 60, at least 65, at least 70, at least 75, at least 80, at least 85, at least 90, at least 95, at least 96, at least 97, at least 98 or at least 99%, sequence identity with SEQ ID NO: 10. In certain embodiments, the nucleotide sequence that encodes the EphA2 scFv comprises the nucleotide sequence that encodes the amino acid sequence of SEQ ID NO: 10, or a variant thereof having at least 50, at least 55, at least 60, at least 65, at least 70, at least 75, at least 80, at least 85, at least 90, at least 95, at least 96, at least 97, at least 98 or at least 99%, sequence identity with SEQ ID NO: 10. In certain embodiments, the nucleotide sequence that encodes the EphA2 scFv comprises the nucleotide sequence set forth in SEQ ID NO: 11, or a nucleotide sequence having at least 50, at least 55, at least 60, at least 65, at least 70, at least 75, at least 80, at least 85, at least 90, at least 95, at least 96, at least 97, at least 98 or at least 99%, sequence identity with SEQ ID NO: 11. In certain embodiments, the EPHA2 scFv comprises the amino acid sequence set forth in SEQ ID NO: 10. In certain embodiments, the nucleotide sequence that encodes the EphA2 scFv comprises the nucleotide sequence set forth in SEQ ID NO: 11.

[0131] In certain embodiments, the antigen-binding moiety comprises a polypeptide or functional variant thereof that binds to B7-H3. In certain embodiments, the antigen-binding moiety is a single chain variable fragment (scFv) that binds to a B7-H3. In some embodiments, the anti-B7-H3 scFv is derived from an mAb specific for the B7-H3, or a functional variant thereof.

[0132] In some embodiments, B7-H3 scFv comprises a heavy chain variable domain (VH) comprising the amino acid sequence set forth in SEQ ID NO: 102, or a variant thereof having at least 50, at least 55, at least 60, at least 65, at least 70, at least 75, at least 80, at least 85, at least 90, at least 95, at least 96, at least 97, at least 98 or at least 99%, sequence identity with SEQ ID NO: 102. In certain embodiments, the nucleotide sequence that encodes the VH of B7-H3 scFv comprises the nucleotide sequence that encodes the amino acid sequence of SEQ ID NO: 94, or a variant thereof having at least 50, at least 55, at least 60, at least 65, at least 70, at least 75, at least 80, at least 85, at least 90, at least 95, at least 96, at least 97, at least 98 or at least 99%, sequence identity with SEQ ID NO: 102. In certain embodiments, the nucleotide sequence that encodes the VH of B7-H3 scFv comprises the nucleotide sequence set forth in SEQ ID NO: 103, or a nucleotide sequence having at least 50, at least 55, at least 60, at least 65, at least 70, at least 75, at least 80, at least 85, at least 90, at least 95, at least 96, at least 97, at least 98 or at least 99%, sequence identity with SEQ ID NO: 103. In certain embodiments, the VH of B7-H3 scFv comprises the amino acid sequence set forth in SEQ ID NO: 102. In certain embodiments, the nucleotide sequence that encodes the VH of B7-H3 scFv comprises the nucleotide sequence set forth in SEQ ID NO: 103.

[0133] In some embodiments, B7-H3 scFv comprises a light chain variable domain (VL) comprising the amino acid sequence set forth in SEQ ID NO: 106, or a variant thereof having at least 50, at least 55, at least 60, at least 65, at least 70, at least 75, at least 80, at least 85, at least 90, at least 95, at least 96, at least 97, at least 98 or at least 99%, sequence identity with SEQ ID NO: 106. In certain embodiments, the nucleotide sequence that encodes the VL of B7-H3 scFv comprises the nucleotide sequence that encodes the amino acid sequence of SEQ ID NO: 106, or a variant thereof having at least 50, at least 55, at least 60, at least 65, at least 70, at least 75, at least 80, at least 85, at least 90, at least 95, at least 96, at least 97, at least 98 or at least 99%, sequence identity with SEQ ID NO: 106. In certain embodiments, the nucleotide sequence that encodes the VL of B7-H3 scFv comprises the nucleotide sequence set forth in SEQ ID NO: 107, or a nucleotide sequence having at least 50, at least 55, at least 60, at least 65, at least 70, at least 75, at least 80, at least 85, at least 90, at least 95, at least 96, at least 97, at least 98 or at least 99%, sequence identity with SEQ ID NO: 107. In certain embodiments, the VL of B7-H3 scFv comprises the amino acid sequence set forth in SEQ ID NO: 106. In certain embodiments, the nucleotide sequence that encodes the VL of B7-H3 scFv comprises the nucleotide sequence set forth in SEQ ID NO: 107.

[0134] In some embodiments, B7-H3 scFv comprises the amino acid sequence set forth in SEQ ID NO: 121, or a variant thereof having at least 50, at least 55, at least 60, at least 65, at least 70, at least 75, at least 80, at least 85, at least 90, at least 95, at least 96, at least 97, at least 98 or at least 99%, sequence identity with SEQ ID NO: 121. In certain embodiments, the nucleotide sequence that encodes the B7-H3 scFv comprises the nucleotide sequence that encodes the amino acid sequence of SEQ ID NO: 121, or a variant thereof having at least 50, at least 55, at least 60, at least 65, at least 70, at least 75, at least 80, at least 85, at least 90, at least 95, at least 96, at least 97, at least 98 or at least 99%, sequence identity with SEQ ID NO: 121. In certain embodiments, the nucleotide sequence that encodes the B7-H3 scFv comprises the nucleotide sequence set forth in SEQ ID NO: 122, or a nucleotide sequence having at least 50, at least 55, at least 60, at least 65, at least 70, at least 75, at least 80, at least 85, at least 90, at least 95, at least 96, at least 97, at least 98 or at least 99%, sequence identity with SEQ ID NO: 122. In certain embodiments, the B7-H3 scFv comprises the amino acid sequence set forth in SEQ ID NO: 121. In certain embodiments, the nucleotide sequence that encodes the B7-H3 scFv comprises the nucleotide sequence set forth in SEQ ID NO: 122.

[0135] Further, the extracellular domain of CAR may comprise a domain that can be paired with multiple, antigen recognition domains (e.g., avidin-CARs/biotin-labeled scFvs, CD16-CAR/MAbs, anti-FITC-CARs/FITC-labeled scFv, coiled-coil CARs (SUPRA CARs), anti-PNE-CARs/PNE-scFv, and NKG2D-CARs/ULBP2-MAb). These CARs are also known as “universal CARs”.

### Leader Sequence

[0136] In certain aspects, the CAR of the present disclosure comprises a leader sequence. The leader sequence may be positioned amino-terminal to the extracellular target-binding domain. The leader sequence may be optionally cleaved from the antigen-binding moiety during cellular processing and localization of the CAR to the cellular membrane.

[0137] In some embodiments, the leader sequence may be derived CD8α or human immunoglobulin heavy chain variable region.

[0138] In some embodiments, the leader sequence may be derived from human immunoglobulin heavy chain variable region. In some embodiments, the leader sequence comprises the amino acid sequence set forth in SEQ ID NO: 5 or a variant thereof having at least 50, at least 55, at least 60, at least 65, at least 70, at least 75, at least 80, at least 85, at least 90, at least 95, at least 96, at least 97, at least 98 or at least 99%, sequence identity with SEQ ID NO: 5. In certain embodiments, the nucleotide sequence encoding the leader sequence comprises the nucleotide sequence that encodes the amino acid sequence of SEQ ID NO: 5, or a variant thereof having at least 50, at least 55, at least 60, at least 65, at least 70, at least 75, at least 80, at least 85, at least 90, at least 95, at least 96, at least 97, at least 98 or at least 99%, sequence identity with SEQ ID NO: 5. In certain embodiments, the nucleotide sequence encoding the leader sequence comprises the sequence set forth in SEQ ID NO: 6, 7, or 100, or a nucleotide sequence having at least 50, at least 55, at least 60, at least 65, at least 70, at least 75, at least 80, at least 85, at least 90, at least 95, at least 96, at least 97, at least 98 or at least 99%, sequence identity with SEQ ID NO: 6, 7, or 100. In certain embodiments, the leader sequence comprises the amino acid sequence of SEQ ID NO: 5. In certain embodiments, the nucleotide sequence encoding the leader sequence comprises the nucleotide sequence set forth in SEQ ID NO: 6, 7, or 100.

[0139] In some embodiments, the leader sequence may be derived from CD8α. In some embodiments, the leader sequence comprises the amino acid sequence set forth in SEQ ID NO: 8 or a variant thereof having at least 50, at least 55, at least 60, at least 65, at least 70, at least 75, at least 80, at least 85, at least 90, at least 95, at least 96, at least 97, at least 98 or at least 99%, sequence identity with SEQ ID NO: 8. In certain embodiments, the nucleotide sequence encoding the leader sequence comprises the nucleotide sequence that encodes the amino acid sequence of SEQ ID NO: 8, or a variant thereof having at least 50, at least 55, at least 60, at least 65, at least 70, at least 75, at least 80, at least 85, at least 90, at least 95, at least 96, at least 97, at least 98 or at least 99%, sequence identity with SEQ ID NO: 8. In certain embodiments, the nucleotide sequence encoding the leader sequence comprises the sequence set forth in SEQ ID NO: 9, or a nucleotide sequence having at least 50, at least 55, at least 60, at least 65, at least 70, at least 75, at least 80, at least 85, at least 90, at least 95, at least 96, at least 97, at least 98 or at least 99%, sequence identity with SEQ ID NO: 9. In certain embodiments, the leader sequence comprises the amino acid sequence of SEQ ID NO: 8. In certain embodiments, the nucleotide sequence encoding the leader sequence comprises the nucleotide sequence set forth in SEQ ID NO: 9.

### Hinge Domain

[0140] In certain embodiments, the CAR further comprises a hinge domain between the extracellular antigen-binding moiety and the transmembrane domain, wherein the antigen-binding moiety, linker, and the transmembrane domain are in frame with each other.

[0141] A hinge domain can comprise any oligo- or polypeptide that functions to link the antigen-binding moiety to the transmembrane domain. A hinge domain can be used to provide more flexibility and accessibility for the antigen-binding moiety. A hinge domain may comprise up to 300 amino acids, preferably 10 to 100 amino acids and most preferably 25 to 50 amino acids. A hinge domain may be derived from all or part of naturally occurring molecules, such as from all or part of the extracellular region of CD8, CD4 or CD28, or from all or part of an antibody constant region. Alternatively, the hinge domain may be a synthetic sequence that corresponds to a naturally occurring linker region sequence, or may be an entirely synthetic linker region sequence. Non-limiting examples of hinge domains which may be used in accordance with the disclosure include a part of human CD8α chain, partial extracellular domain of CD28, FcyRIIIa receptor, IgG, IgM, IgA, IgD, IgE, an Ig hinge, or functional fragment thereof. In some embodiments, additional linking amino acids are added to the linker region to ensure that the antigen-binding moiety is an optimal distance from the transmembrane domain. In some embodiments, when the hinge domain is derived from an Ig, the linker may be mutated to prevent Fc receptor binding.

[0142] In some embodiments, the hinge domain may be derived from CD8α, CD28, or an immunoglobulin (IgG). For example, the IgG hinge may be from IgG1, IgG2, IgG3, IgG4, IgM1, IgM2, IgA1, IgA2, IgD, IgE, or a chimera thereof.

[0143] In certain embodiments, the linker domain comprises an immunoglobulin IgG hinge or functional fragment thereof. In certain embodiments, the IgG hinge is from IgG1, IgG2, IgG3, IgG4, IgM1, IgM2, IgA1, IgA2, IgD, IgE, or a chimera thereof. In certain embodiments, the linker domain comprises the CH1, CH2, CH3 and/or hinge region of the immunoglobulin. In certain embodiments, the linker domain comprises the core hinge region of the immunoglobulin. The term “core hinge” can be used interchangeably with the term “short hinge” (a.k.a “SH”). Non-limiting examples of suitable linker domains are the core immunoglobulin hinge regions listed in Table 4 (see also Wypych et al., JBC 2008 283 (23): 16194-16205, which is incorporated herein by reference in its entirety for all purposes). In certain embodiments, the linker domain is a fragment of the immunoglobulin hinge.

TABLE 4
Amino Acid Sequence of Short Hinge Regions of IgG Immunoglobulins

| IgG Subtype | Short Hinge Sequence | SEQ ID NO |
|---|---|---|
| IgG1 | DLEPKSCDKTHTCPPCPDPK | SEQ ID NO: 26 |
| IgG1 | EPKSCDKTHTCPPCP | SEQ ID NO: 34 |
| IgG2 | ERKCCVECPPCP | SEQ ID NO: 35 |
| IgG3 | ELKTPLGDTTHTCPRCP(EPKSCDTPPPCPRCP)₃ | SEQ ID NO: 36 |
| IgG4 | ESKYGPPCPSCP | SEQ ID NO: 37 |

[0144] In certain embodiments, the hinge domain comprises an IgG1 hinge, or a variant thereof. In certain embodiments, the hinge domain comprises the short hinge structure of IgG1, IgG2, IgG3, or IgG4 or a variant thereof. In certain embodiments, hinge domain comprises a short hinge region and comprises the amino acid sequence set forth in SEQ ID NO: 26, 34, 35, 36, or 37, or a variant thereof having at least 50, at least 55, at least 60, at least 65, at least 70, at least 75, at least 80, at least 85, at least 90, at least 95, at least 96, at least 97, at least 98 or at least 99%, sequence identity with SEQ ID NO: 26, 34, 35, 36, or 37. In certain embodiments, the nucleotide sequence encoding the hinge comprising the short hinge region comprises the nucleotide sequence that encodes the amino acid sequence of SEQ ID NO: 26, 34, 35, 36, or 37, or a variant thereof having at least 50, at least 55, at least 60, at least 65, at least 70, at least 75, at least 80, at least 85, at least 90, at least 95, at least 96, at least 97, at least 98 or at least 99%, sequence identity with SEQ ID NO: 26, 34, 35, 36, or 37. In certain embodiments, hinge domain comprises a short hinge region and comprises the amino acid sequence set forth in SEQ ID NO: 26, 34, 35, 36, or 37.

[0145] In certain embodiments, hinge domain comprises a short hinge region and comprises the amino acid sequence set forth in SEQ ID NO: 26, or a variant thereof having at least 50, at least 55, at least 60, at least 65, at least 70, at least 75, at least 80, at least 85, at least 90, at least 95, at least 96, at least 97, at least 98 or at least 99%, sequence identity with SEQ ID NO: 26. In certain embodiments, the nucleotide sequence encoding the hinge comprising the short hinge region comprises the nucleotide sequence that encodes the amino acid sequence of SEQ ID NO: 26, or a variant thereof having at least 50, at least 55, at least 60, at least 65, at least 70, at least 75, at least 80, at least 85, at least 90, at least 95, at least 96, at least 97, at least 98 or at least 99%, sequence identity with SEQ ID NO: 26. In certain embodiments, hinge domain comprises a short hinge region and comprises the amino acid sequence set forth in SEQ ID NO: 26. In certain embodiments, the nucleotide sequence encoding the hinge comprising the short hinge region comprises the nucleotide sequence of SEQ ID NO: 27, or a nucleotide sequence having at least 50, at least 55, at least 60, at least 65, at least 70, at least 75, at least 80, at least 85, at least 90, at least 95, at least 96, at least 97, at least 98 or at least 99%, sequence identity with SEQ ID NO: 27. In certain embodiments, the short hinge region comprises the amino acid sequence set forth in SEQ ID NO: 26. In certain embodiments, the nucleotide sequence that encodes the short hinge region comprises the nucleotide sequence set forth in SEQ ID NO: 27.

[0146] In some embodiments, the hinge domain is derived from IgG4. In some embodiments, the hinge domain derived from IgG4 comprises the amino acid sequence set forth in SEQ ID NO: 28, or a variant thereof having at least 50, at least 55, at least 60, at least 65, at least 70, at least 75, at least 80, at least 85, at least 90, at least 95, at least 96, at least 97, at least 98 or at least 99%, sequence identity with SEQ ID NO: 28. In certain embodiments, the nucleotide sequence that encodes the IgG4 hinge domain comprises the nucleotide sequence that encodes the amino acid sequence of SEQ ID NO: 28, or a variant thereof having at least 50, at least 55, at least 60, at least 65, at least 70, at least 75, at least 80, at least 85, at least 90, at least 95, at least 96, at least 97, at least 98 or at least 99%, sequence identity with SEQ ID NO: 28. In certain embodiments, the nucleotide sequence that encodes the IgG4 hinge domain comprises the nucleotide sequence set forth in SEQ ID NO: 29, or a nucleotide sequence having at least 50, at least 55, at least 60, at least 65, at least 70, at least 75, at least 80, at least 85, at least 90, at least 95, at least 96, at least 97, at least 98 or at least 99%, sequence identity with SEQ ID NO: 29. In certain embodiments, the IgG4 hinge domain comprises the amino acid sequence set forth in SEQ ID NO: 28. In certain embodiments, the nucleotide sequence that encodes the IgG4 hinge domain comprises the nucleotide sequence set forth in SEQ ID NO: 29.

[0147] In some embodiments, the hinge domain is derived from CD8α stalk or complete or partial sequences of the CD8α stalk, which are also called CD8α hinge. In some embodiments, the hinge domain derived from CD8α stalk comprises the amino acid sequence set forth in SEQ ID NO: 30, or a variant thereof having at least 50, at least 55, at least 60, at least 65, at least 70, at least 75, at least 80, at least 85, at least 90, at least 95, at least 96, at least 97, at least 98 or at least 99%, sequence identity with SEQ ID NO: 30. In certain embodiments, the nucleotide sequence that encodes the CD8α stalk hinge domain comprises the nucleotide sequence that encodes the amino acid sequence of SEQ ID NO: 30, or a variant thereof having at least 50, at least 55, at least 60, at least 65, at least 70, at least 75, at least 80, at least 85, at least 90, at least 95, at least 96, at least 97, at least 98 or at least 99%, sequence identity with SEQ ID NO: 30. In certain embodiments, the nucleotide sequence that encodes the CD8α stalk hinge domain comprises the nucleotide sequence set forth in SEQ ID NO: 31 or 108, or a nucleotide sequence having at least 50, at least 55, at least 60, at least 65, at least 70, at least 75, at least 80, at least 85, at least 90, at least 95, at least 96, at least 97, at least 98 or at least 99%, sequence identity with SEQ ID NO: 31 or 108. In certain embodiments, the CD8α stalk hinge domain comprises the amino acid sequence set forth in SEQ ID NO: 30. In certain embodiments, the nucleotide sequence that encodes the CD8α stalk hinge domain comprises the nucleotide sequence set forth in SEQ ID NO: 31 or 108.

[0148] In some embodiments, the hinge domain is derived from CD28. In some embodiments, the hinge domain derived from CD28 hinge domain comprises the amino acid sequence set forth in SEQ ID NO: 32, or a variant thereof having at least 50, at least 55, at least 60, at least 65, at least 70, at least 75, at least 80, at least 85, at least 90, at least 95, at least 96, at least 97, at least 98 or at least 99%, sequence identity with SEQ ID NO: 32. In certain embodiments, the nucleotide sequence that encodes the CD28 hinge domain comprises the nucleotide sequence that encodes the amino acid sequence of SEQ ID NO: 32, or a variant thereof having at least 50, at least 55, at least 60, at least 65, at least 70, at least 75, at least 80, at least 85, at least 90, at least 95, at least 96, at least 97, at least 98 or at least 99%, sequence identity with SEQ ID NO: 32. In certain embodiments, the nucleotide sequence that encodes the CD28 hinge domain comprises the nucleotide sequence set forth in SEQ ID NO: 33, or a nucleotide sequence having at least 50, at least 55, at least 60, at least 65, at least 70, at least 75, at least 80, at least 85, at least 90, at least 95, at least 96, at least 97, at least 98 or at least 99%, sequence identity with SEQ ID NO: 33. In certain embodiments, the CD28 hinge domain comprises the amino acid sequence set forth in SEQ ID NO: 32. In certain embodiments, the nucleotide sequence that encodes the CD28 hinge domain comprises the nucleotide sequence set forth in SEQ ID NO: 33.

[0149] In some embodiments, in addition to the sequences described above, the hinge domain can comprise additional linker amino acids to allow for extra flexibility and/or accessibility.

### Transmembrane Domain

[0150] In certain aspects, the CARs of the present disclosure comprise a transmembrane domain, fused in frame between the extracellular target-binding domain and the cytoplasmic domain.

[0151] The transmembrane domain may be derived from the protein contributing to the extracellular target-binding domain, the protein contributing the signaling or co-signaling domain, or by a totally different protein. In some instances, the transmembrane domain can be selected or modified by amino acid substitution, deletions, or insertions to minimize interactions with other members of the CAR complex. In some instances, the transmembrane domain can be selected or modified by amino acid substitution, deletions, or insertions to avoid-binding of proteins naturally associated with the transmembrane domain. In certain embodiments, the transmembrane domain includes additional amino acids to allow for flexibility and/or optimal distance between the domains connected to the transmembrane domain.

[0152] The transmembrane domain may be derived either from a natural or from a synthetic source. Where the source is natural, the domain may be derived from any membrane-bound or transmembrane protein. Non-limiting examples of transmembrane domains of particular use in this disclosure may be derived from (i.e. comprise at least the transmembrane region(s) of) the α, β or ζ chain of the T-cell receptor, CD28, CD3 epsilon, CD45, CD4, CD5, CD8, CD8α, CD9, CD16, CD22, CD33, CD37, CD40, CD64, CD80, CD86, CD134, CD137, CD154. Alternatively, the transmembrane domain may be synthetic, in which case it will comprise predominantly hydrophobic residues such as leucine and valine. For example, a triplet of phenylalanine, tryptophan and/or valine can be found at each end of a synthetic transmembrane domain.

[0153] In some embodiments, the transmembrane domain may be derived from CD8α, CD28, CD8, CD4, CD3ζ, CD40, CD134 (OX-40), NKG2A/C/D/E, or CD7. In some embodiments, the transmembrane domain may be derived from CD28.

[0154] In certain embodiments, it will be desirable to utilize the transmembrane domain of the ζ, η or FcεR1γ chains which contain a cysteine residue capable of disulfide bonding, so that the resulting chimeric protein will be able to form disulfide linked dimers with itself, or with unmodified versions of the ζ, η or FcεR1γ chains or related proteins. In some instances, the transmembrane domain will be selected or modified by amino acid substitution to avoid-binding of such domains to the transmembrane domains of the same or different surface membrane proteins to minimize interactions with other members of the receptor complex. In other cases, it will be desirable to employ the transmembrane domain of ζ, η or FcΣR1γ and -β, MB1 (Igα.), B29 or CD3− γ, δ, or η, in order to retain physical association with other members of the receptor complex.

[0155] In certain embodiments, the transmembrane domain in the CAR of the disclosure is derived from the CD28 transmembrane domain. In certain embodiments, the CD28 transmembrane domain comprises the amino acid sequence set forth in SEQ ID NO: 38, or a variant thereof having at least 50, at least 55, at least 60, at least 65, at least 70, at least 75, at least 80, at least 85, at least 90, at least 95, at least 96, at least 97, at least 98 or at least 99%, sequence identity with SEQ ID NO: 38. In certain embodiments, the nucleotide sequence that encodes the CD28 transmembrane domain comprises the nucleotide sequence that encodes the amino acid sequence of SEQ ID NO: 38, or a variant thereof having at least 50, at least 55, at least 60, at least 65, at least 70, at least 75, at least 80, at least 85, at least 90, at least 95, at least 96, at least 97, at least 98 or at least 99%, sequence identity with SEQ ID NO: 38. In certain embodiments, the nucleotide sequence that encodes the CD28 transmembrane domain comprises the nucleotide sequence set forth in SEQ ID NO: 39, or a nucleotide sequence having at least 50, at least 55, at least 60, at least 65, at least 70, at least 75, at least 80, at least 85, at least 90, at least 95, at least 96, at least 97, at least 98 or at least 99%, sequence identity with SEQ ID NO: 39. In certain embodiments, the CD28 transmembrane domain comprises the amino acid sequence set forth in SEQ ID NO: 38. In certain embodiments, the nucleotide sequence that encodes the CD28 transmembrane domain comprises the nucleotide sequence set forth in SEQ ID NO: 39.

[0156] In certain embodiments, the transmembrane domain in the CAR of the disclosure is derived from the CD28 transmembrane domain. In certain embodiments, the CD28 transmembrane domain comprises the amino acid sequence set forth in SEQ ID NO: 40, or a variant thereof having at least 50, at least 55, at least 60, at least 65, at least 70, at least 75, at least 80, at least 85, at least 90, at least 95, at least 96, at least 97, at least 98 or at least 99%, sequence identity with SEQ ID NO: 40. In certain embodiments, the nucleotide sequence that encodes the CD28 transmembrane domain comprises the nucleotide sequence that encodes the amino acid sequence of SEQ ID NO: 40, or a variant thereof having at least 50, at least 55, at least 60, at least 65, at least 70, at least 75, at least 80, at least 85, at least 90, at least 95, at least 96, at least 97, at least 98 or at least 99%, sequence identity with SEQ ID NO: 40. In certain embodiments, the nucleotide sequence that encodes the CD28 transmembrane domain comprises the nucleotide sequence set forth in SEQ ID NO: 41, or a nucleotide sequence having at least 50, at least 55, at least 60, at least 65, at least 70, at least 75, at least 80, at least 85, at least 90, at least 95, at least 96, at least 97, at least 98 or at least 99%, sequence identity with SEQ ID NO: 41. In certain embodiments, the CD28 transmembrane domain comprises the amino acid sequence set forth in SEQ ID NO: 40. In certain embodiments, the nucleotide sequence that encodes the CD28 transmembrane domain comprises the nucleotide sequence set forth in SEQ ID NO: 41.

[0157] In certain embodiments, the transmembrane domain in the CAR of the disclosure is derived from the CD8α transmembrane domain. In certain embodiments, the CD8α transmembrane domain comprises the amino acid sequence set forth in SEQ ID NO: 38, or a variant thereof having at least 50, at least 55, at least 60, at least 65, at least 70, at least 75, at least 80, at least 85, at least 90, at least 95, at least 96, at least 97, at least 98 or at least 99%, sequence identity with SEQ ID NO: 38. In certain embodiments, the nucleotide sequence that encodes the CD8α transmembrane domain comprises the nucleotide sequence that encodes the amino acid sequence of SEQ ID NO: 38, or a variant thereof having at least 50, at least 55, at least 60, at least 65, at least 70, at least 75, at least 80, at least 85, at least 90, at least 95, at least 96, at least 97, at least 98 or at least 99%, sequence identity with SEQ ID NO: 38. In certain embodiments, the nucleotide sequence that encodes the CD8α transmembrane domain comprises the nucleotide sequence set forth in SEQ ID NO: 39, or a nucleotide sequence having at least 50, at least 55, at least 60, at least 65, at least 70, at least 75, at least 80, at least 85, at least 90, at least 95, at least 96, at least 97, at least 98 or at least 99%, sequence identity with SEQ ID NO: 39. In certain embodiments, the CD8α transmembrane domain comprises the amino acid sequence set forth in SEQ ID NO: 38. In certain embodiments, the nucleotide sequence that encodes the CD8α transmembrane domain comprises the nucleotide sequence set forth in SEQ ID NO: 39.

[0158] In certain embodiments, the CD8α transmembrane domain comprises the amino acid sequence set forth in SEQ ID NO: 111, or a variant thereof having at least 50, at least 55, at least 60, at least 65, at least 70, at least 75, at least 80, at least 85, at least 90, at least 95, at least 96, at least 97, at least 98 or at least 99%, sequence identity with SEQ ID NO: 111. In certain embodiments, the nucleotide sequence that encodes the CD8α transmembrane domain comprises the nucleotide sequence that encodes the amino acid sequence of SEQ ID NO: 111, or a variant thereof having at least 50, at least 55, at least 60, at least 65, at least 70, at least 75, at least 80, at least 85, at least 90, at least 95, at least 96, at least 97, at least 98 or at least 99%, sequence identity with SEQ ID NO: 111. In certain embodiments, the nucleotide sequence that encodes the CD8α transmembrane domain comprises the nucleotide sequence set forth in SEQ ID NO: 112, or a nucleotide sequence having at least 50, at least 55, at least 60, at least 65, at least 70, at least 75, at least 80, at least 85, at least 90, at least 95, at least 96, at least 97, at least 98 or at least 99%, sequence identity with SEQ ID NO: 112. In certain embodiments, the CD8α transmembrane domain comprises the amino acid sequence set forth in SEQ ID NO: 111. In certain embodiments, the nucleotide sequence that encodes the CD8α transmembrane domain comprises the nucleotide sequence set forth in SEQ ID NO: 112.

[0159] In certain embodiments, the transmembrane domain in the CAR of the disclosure is derived from the CD3ζ transmembrane domain. In certain embodiments, the CD33 transmembrane domain comprises the amino acid sequence set forth in SEQ ID NO: 44, or a variant thereof having at least 50, at least 55, at least 60, at least 65, at least 70, at least 75, at least 80, at least 85, at least 90, at least 95, at least 96, at least 97, at least 98 or at least 99%, sequence identity with SEQ ID NO: 44. In certain embodiments, the nucleotide sequence that encodes the CD8α transmembrane domain comprises the nucleotide sequence that encodes the amino acid sequence of SEQ ID NO: 44, or a variant thereof having at least 50, at least 55, at least 60, at least 65, at least 70, at least 75, at least 80, at least 85, at least 90, at least 95, at least 96, at least 97, at least 98 or at least 99%, sequence identity with SEQ ID NO: 44. In certain embodiments, the nucleotide sequence that encodes the CD8α transmembrane domain comprises the nucleotide sequence set forth in SEQ ID NO: 45, or a nucleotide sequence having at least 50, at least 55, at least 60, at least 65, at least 70, at least 75, at least 80, at least 85, at least 90, at least 95, at least 96, at least 97, at least 98 or at least 99%, sequence identity with SEQ ID NO: 45. In certain embodiments, the CD8α transmembrane domain comprises the amino acid sequence set forth in SEQ ID NO: 44. In certain embodiments, the nucleotide sequence that encodes the CD8α transmembrane domain comprises the nucleotide sequence set forth in SEQ ID NO: 45.

### Cytoplasmic Domain

### Costimulatory and Signaling Domain

[0160] In certain aspects, CARs of the present disclosure comprise a cytoplasmic domain, which comprises one or more costimulatory domains and one or more signaling domains. The cytoplasmic domain, which comprises one or more costimulatory domains and one or more signaling domains, is responsible for activation of at least one of the normal effector functions of the lymphocyte in which the CAR has been placed in. The term “effector function” refers to a specialized function of a cell. Effector function of a T-cell, for example, may be cytolytic activity or helper activity including the secretion of cytokines. Thus, the term “signaling domain” refers to the portion of a protein which transduces the effector function signal and directs the cell to perform a specialized function. While usually the entire signaling domain is present, in many cases it is not necessary to use the entire chain. To the extent that a truncated portion of the intracellular signaling domain is used, such truncated portion may be used in place of the intact chain as long as it transduces the effector function signal. The term intracellular signaling domain is thus meant to include any truncated portion of the signaling domain sufficient to transduce the effector function signal.

[0161] Non-limiting examples of signaling domains which can be used in the CARs of the present disclosure include, e.g., signaling domains derived from DAP10, DAP12, Fc epsilon receptor I γ chain (FCER1G), FcR β, CD3δ, CD3ε, CD3γ, CD3ζ, CD5, CD22, CD226, NKG2D, CD66d, CD79A, and CD79B. In some embodiments, the CAR of the present disclosure comprises a signaling domain derived from CD3ζ.

[0162] In certain embodiments, the lymphocyte activation domain in the CAR of the disclosure is designed to comprise the signaling domain of CD3ζ. In certain embodiments, the CD3ζ signaling domain comprises the amino acid sequence set forth in SEQ ID NO: 60 or a variant thereof having at least 50, at least 55, at least 60, at least 65, at least 70, at least 75, at least 80, at least 85, at least 90, at least 95, at least 96, at least 97, at least 98 or at least 99%, sequence identity with SEQ ID NO: 60. In certain embodiments, the nucleotide sequence that encodes the CD33 signaling domain comprises the nucleotide sequence that encodes the amino acid sequence of SEQ ID NO: 60, or a variant thereof having at least 50, at least 55, at least 60, at least 65, at least 70, at least 75, at least 80, at least 85, at least 90, at least 95, at least 96, at least 97, at least 98 or at least 99%, sequence identity with SEQ ID NO: 60. In certain embodiments, the nucleotide sequence that encodes the CD33 signaling domain comprises the nucleotide sequence set forth in SEQ ID NO: 61 or 110, or a nucleotide sequence having at least 50, at least 55, at least 60, at least 65, at least 70, at least 75, at least 80, at least 85, at least 90, at least 95, at least 96, at least 97, at least 98 or at least 99%, sequence identity with SEQ ID NO: 61 or 110. In certain embodiments, the CD3ζ signaling domain comprises the amino acid sequence set forth in SEQ ID NO: 60. In certain embodiments, the nucleotide sequence that encodes the CD3ζ signaling domain comprises the nucleotide sequence set forth in SEQ ID NO: 61 or 110.

[0163] In certain embodiments, the CD33 signaling domain comprises the amino acid sequence set forth in SEQ ID NO: 62 or a variant thereof having at least 50, at least 55, at least 60, at least 65, at least 70, at least 75, at least 80, at least 85, at least 90, at least 95, at least 96, at least 97, at least 98 or at least 99%, sequence identity with SEQ ID NO: 62. In certain embodiments, the nucleotide sequence that encodes the CD33 signaling domain comprises the nucleotide sequence that encodes the amino acid sequence of SEQ ID NO: 62, or a variant thereof having at least 50, at least 55, at least 60, at least 65, at least 70, at least 75, at least 80, at least 85, at least 90, at least 95, at least 96, at least 97, at least 98 or at least 99%, sequence identity with SEQ ID NO: 62. In certain embodiments, the nucleotide sequence that encodes the CD3ζ signaling domain comprises the nucleotide sequence set forth in SEQ ID NO: 61, or a nucleotide sequence having at least 50, at least 55, at least 60, at least 65, at least 70, at least 75, at least 80, at least 85, at least 90, at least 95, at least 96, at least 97, at least 98 or at least 99%, sequence identity with SEQ ID NO: 63. In certain embodiments, the CD3ζ signaling domain comprises the amino acid sequence set forth in SEQ ID NO: 63. In certain embodiments, the nucleotide sequence that encodes the CD3ζ signaling domain comprises the nucleotide sequence set forth in SEQ ID NO: 62.

[0164] Non-limiting examples of costimulatory domains which can be used in the CARs of the present disclosure include, those derived from 4-1BB (CD137), CD28, CD40, ICOS, CD134 (OX-40), BTLA, CD27, CD30, GITR, CD226, CD79A, HVEM, MyD88, IL-2Rβ, or the STAT3-binding YXXQ. In some embodiments, the CAR of the present disclosure comprises one costimulatory domain. In some embodiments, the CAR of the present disclosure comprises a costimulatory domain derived from CD28.

[0165] In some embodiments, the costimulatory domains which can be used in the CARs of the present disclosure may be derived from CD28, 4-1BB, CD27, CD40, CD134, CD226, CD79A, ICOS, or MyD88, or any combination thereof.

[0166] In some embodiments, the CAR of the present disclosure comprises two or more costimulatory domains. In certain embodiments, the CAR of the present disclosure comprises two, three, four, five, six or more costimulatory domains. For example, the CAR of the present disclosure may comprise a costimulatory domain derived from 4-1BB and a costimulatory domain derived from CD28.

[0167] In certain embodiments, the CARs of the present disclosure comprise a cytoplasmic domain, which comprises a signaling domain, a MyD88 polypeptide or functional fragment thereof, and a CD40 cytoplasmic polypeptide region or a functional fragment thereof. In certain embodiments, the CAR lacks the CD40 transmembrane and/or CD40 extracellular domains. In certain embodiments, the CAR includes the CD40 transmembrane domain. In certain embodiments, the CAR includes the CD40 transmembrane domain and a portion of the CD40 extracellular domain, wherein the CD40 extracellular domain does not interact with natural or synthetic ligands of CD40.

[0168] In certain embodiments, the signaling domain is separated from the MyD88 polypeptide or functional fragment thereof and/or the CD40 cytoplasmic polypeptide region or a functional fragment thereof. In certain embodiments, the lymphocyte activation domain is separated from the MyD88 polypeptide or functional fragment thereof and/or the CD40 cytoplasmic polypeptide region or a functional fragment thereof by at least 1, 2, 3, 4, 5, 6, 7, 8, 9, 10, 11, 12, 13, 14, or 15 amino acids.

[0169] In some embodiments, the signaling domain(s) and costimulatory domain(s) can be in any order. In some embodiments, the signaling domain is upstream of the costimulatory domains. In some embodiments, the signaling domain is downstream from the costimulatory domains. In the cases where two or more costimulatory domains are included, the order of the costimulatory domains could be switched.

[0170] In some embodiments, the costimulatory domain derived from CD28 comprises the amino acid sequence set forth in SEQ ID NO: 46, or a variant thereof having at least 50, at least 55, at least 60, at least 65, at least 70, at least 75, at least 80, at least 85, at least 90, at least 95, at least 96, at least 97, at least 98 or at least 99%, sequence identity with SEQ ID NO: 46. In certain embodiments, the nucleotide sequence that encodes the CD28 costimulatory domain comprises the nucleotide sequence that encodes the amino acid sequence of SEQ ID NO: 46, or a variant thereof having at least 50, at least 55, at least 60, at least 65, at least 70, at least 75, at least 80, at least 85, at least 90, at least 95, at least 96, at least 97, at least 98 or at least 99%, sequence identity with SEQ ID NO: 46. In certain embodiments, the nucleotide sequence that encodes the CD28 costimulatory domain comprises the nucleotide sequence set forth in SEQ ID NO: 47 or 109, or a nucleotide sequence having at least 50, at least 55, at least 60, at least 65, at least 70, at least 75, at least 80, at least 85, at least 90, at least 95, at least 96, at least 97, at least 98 or at least 99%, sequence identity with SEQ ID NO: 47 or 109. In certain embodiments, the CD28 costimulatory domain comprises the amino acid sequence set forth in SEQ ID NO: 46. In certain embodiments, the nucleotide sequence that encodes the CD28 costimulatory domain comprises the nucleotide sequence set forth in SEQ ID NO: 47 or 109.

[0171] In some embodiments, the costimulatory domain derived from 4-1BB comprises the amino acid sequence set forth in SEQ ID NO: 48, or a variant thereof having at least 50, at least 55, at least 60, at least 65, at least 70, at least 75, at least 80, at least 85, at least 90, at least 95, at least 96, at least 97, at least 98 or at least 99%, sequence identity with SEQ ID NO: 48. In certain embodiments, the nucleotide sequence that encodes the 4-1BB costimulatory domain comprises the nucleotide sequence that encodes the amino acid sequence of SEQ ID NO: 48, or a variant thereof having at least 50, at least 55, at least 60, at least 65, at least 70, at least 75, at least 80, at least 85, at least 90, at least 95, at least 96, at least 97, at least 98 or at least 99%, sequence identity with SEQ ID NO: 48. In certain embodiments, the nucleotide sequence that encodes the 4-1BB costimulatory domain comprises the nucleotide sequence set forth in SEQ ID NO: 49, or a nucleotide sequence having at least 50, at least 55, at least 60, at least 65, at least 70, at least 75, at least 80, at least 85, at least 90, at least 95, at least 96, at least 97, at least 98 or at least 99%, sequence identity with SEQ ID NO: 49. In certain embodiments, the 4-1BB costimulatory domain comprises the amino acid sequence set forth in SEQ ID NO: 48. In certain embodiments, the nucleotide sequence that encodes the 4-1BB costimulatory domain comprises the nucleotide sequence set forth in SEQ ID NO: 49.

[0172] In some embodiments, the costimulatory domain derived from OX40 comprises the amino acid sequence set forth in SEQ ID NO: 50, or a variant thereof having at least 50, at least 55, at least 60, at least 65, at least 70, at least 75, at least 80, at least 85, at least 90, at least 95, at least 96, at least 97, at least 98 or at least 99%, sequence identity with SEQ ID NO: 50. In certain embodiments, the nucleotide sequence that encodes the OX40 costimulatory domain comprises the nucleotide sequence that encodes the amino acid sequence of SEQ ID NO: 50, or a variant thereof having at least 50, at least 55, at least 60, at least 65, at least 70, at least 75, at least 80, at least 85, at least 90, at least 95, at least 96, at least 97, at least 98 or at least 99%, sequence identity with SEQ ID NO: 50. In certain embodiments, the nucleotide sequence that encodes the OX40 costimulatory domain comprises the nucleotide sequence set forth in SEQ ID NO: 51, or a nucleotide sequence having at least 50, at least 55, at least 60, at least 65, at least 70, at least 75, at least 80, at least 85, at least 90, at least 95, at least 96, at least 97, at least 98 or at least 99%, sequence identity with SEQ ID NO: 51. In certain embodiments, the OX40 costimulatory domain comprises the amino acid sequence set forth in SEQ ID NO: 50. In certain embodiments, the nucleotide sequence that encodes the OX40 costimulatory domain comprises the nucleotide sequence set forth in SEQ ID NO: 51.

[0173] In certain embodiments, the MyD88 polypeptide or functional fragment thereof in the CAR of the disclosure is designed to comprise the co-stimulatory domain of MyD88, or variant thereof. In certain embodiments, the MyD88 functional fragment comprises the amino acid sequence set forth in SEQ ID NO: 52, 54, or 56, or a variant thereof having at least 50, at least 55, at least 60, at least 65, at least 70, at least 75, at least 80, at least 85, at least 90, at least 95, at least 96, at least 97, at least 98 or at least 99%, sequence identity with SEQ ID NO: 52, 54, or 56. In certain embodiments, the nucleotide sequence encoding the MyD88 functional fragment comprises the nucleotide sequence that encodes the amino acid sequence of SEQ ID NO: 52, 54, or 56, or a variant thereof having at least 50, at least 55, at least 60, at least 65, at least 70, at least 75, at least 80, at least 85, at least 90, at least 95, at least 96, at least 97, at least 98 or at least 99%, sequence identity with SEQ ID NO: 52, 54, or 56. In certain embodiments, the nucleotide sequence encoding the MyD88 functional fragment comprises the nucleotide sequence set forth in SEQ ID NO: 53, 55, or 57, or a nucleotide sequence having at least 50, at least 55, at least 60, at least 65, at least 70, at least 75, at least 80, at least 85, at least 90, at least 95, at least 96, at least 97, at least 98 or at least 99%, sequence identity with SEQ ID NO: 53, 55, or 57. In certain embodiments, the MyD88 functional fragment comprises the amino acid sequence set forth in SEQ ID NO: 52, 54, or 56. In certain embodiments, the nucleotide sequence that encodes the MyD88 functional fragment comprises the nucleotide sequence set forth in SEQ ID NO: 53, 55, 57.

[0174] In certain embodiments, the CD40 polypeptide or functional fragment thereof in the CAR of the disclosure is designed to comprise the CD40 cytoplasmic polypeptide region. In certain embodiments, the CD40 cytoplasmic polypeptide region comprises the amino acid sequence set forth in SEQ ID NO: 58 or a variant thereof having at least 50, at least 55, at least 60, at least 65, at least 70, at least 75, at least 80, at least 85, at least 90, at least 95, at least 96, at least 97, at least 98 or at least 99%, sequence identity with SEQ ID NO: 58. In certain embodiments, the nucleotide sequence encoding the CD40 cytoplasmic polypeptide region comprises the nucleotide sequence that encodes the amino acid sequence of SEQ ID NO: 58, or a variant thereof having at least 50, at least 55, at least 60, at least 65, at least 70, at least 75, at least 80, at least 85, at least 90, at least 95, at least 96, at least 97, at least 98 or at least 99%, sequence identity with SEQ ID NO: 58. In certain embodiments, the nucleotide sequence encoding the CD40 cytoplasmic polypeptide region comprises the nucleotide sequence set forth in SEQ ID NO: 59, or a nucleotide sequence having at least 50, at least 55, at least 60, at least 65, at least 70, at least 75, at least 80, at least 85, at least 90, at least 95, at least 96, at least 97, at least 98 or at least 99%, sequence identity with SEQ ID NO: 59. In certain embodiments, the CD40 cytoplasmic polypeptide region comprises the amino acid sequence of SEQ ID NO: 58. In certain embodiments, the nucleotide sequence encoding the CD40 cytoplasmic polypeptide region comprises the nucleotide sequence set forth in SEQ ID NO: 59.

### Anchoring Domain

[0175] In certain aspects, CARs of the present disclosure comprise a cytoplasmic domain, which comprises one or more anchoring domains. In some embodiments, the anchoring domain may be located at the C-terminal position of the CAR. In some embodiments, the anchoring domain may bind to a cell polarity protein, which may be capable of regulating or modifying spatial differences in shape, structure, and/or function within a cell, e.g., a eukaryotic cell, including an immune cell. By way of a non-limiting example, the cell polarity protein comprising the anchoring domain of the CAR disclosed herein may participate in synapse formation, migration, organization, and replication. In some embodiments, the cell polarity protein may comprise a Postsynaptic density-95, Discs large, and Zona occludens 1 (PDZ) domain. In some embodiments the anchoring domain may comprise a PDZ binding motif (PDZbm), which may be capable of binding a cell polarity protein comprising a PDZ domain. In some embodiments, the PDZbm may bind to Scribble.

[0176] In some embodiments, the cell polarity protein may comprise a PDZ domain. The PDZ domain may be derived from any of various classes of PDZ domains. Without wishing to be bound by theory, the PDZ domain may be derived from: (1) class I, which may recognize the motif S/T-X-Φ; (2) class II domains, which may recognize the motif Φ-X-Φ; and (3) class III domains, which may recognize the motif D/E-X-Φ as their preferred C-terminal motif, where Φ represents a hydrophobic residue (see, Lee and Zheng, Cell Communication and Signaling volume 8, Article number: 8 (2010), which is incorporated hereby by reference in its entirety).

[0177] Non-limiting examples of human PDZ domain-containing proteins include AAG12, AHNAK, AHNAK2, AIP1, ALP, APBA1, APBA2, APBA3, ARHGAP21, ARHGAP23, ARHGEF11, ARHGEF12, CARD10, CARD11, CARD14, CASK, CLP-36, CNKSR2, CNKSR3, CRTAM, DFNB31, DLG1, DLG2, DLG3, DLG4, DLG5, DVL1, DVL1L1, DVL2, DVL3, ERBB2IP, FRMPD1, FRMPD2, FRMPD2L1, FRMPD3, FRMPD4, GIPC1, GIPC2, GIPC3, GOPC, GRASP, GRIP1, GRIP2, HTRA1, HTRA2, HTRA3, HTRA4, IL16, INADL, KIAA1849, LDB3, LIMK1, LIMK2, LIN7A, LIN7B, LIN7C, LMO7, LNX1, LNX2, LRRC7, MAGI1, MAGI2, MAGI3, MAGIX, MAST1, MAST2, MAST3, MAST4, MCSP, MLLT4, MPDZ, MPP1, MPP2, MPP3, MPP4, MPP5, MPP6, MPP7, MYO18A, NHERF1, NOS1, PARD3, PARD6A, PARD6B, PARD6G, PDLIM1, PDLIM2, PDLIM3, PDLIM4, PDLIM5, PDLIM7, PDZD11, PDZD2, PDZD3, PDZD4, PDZD5A, PDZD7, PDZD8, PDZK1, PDZRN3, PDZRN4, PICK1, PPP1R9A, PPP1R9B, PREX1, PRX, PSCDBP, PTPN13, PTPN3, PTPN4, RAPGEF2, RGS12, RGS3, RHPN1, RIL, RIMS1, RIMS2, SCN5A, SCRIB (Scribble), SDCBP, SDCBP2, SHANK1, SHANK2, SHANK3, SHROOM2, SHROOM3, SHROOM4, SIPA1, SIPA1L1, SIPA1L2, SIPA1L3, SLC9A3R1, SLC9A3R2, SNTA1, SNTB1, SNTB2, SNTG1, SNTG2, SNX27, SPAL2, STXBP4, SYNJ2BP, SYNPO2, SYNPO2L, TAX1BP3, TIAM1, TIAM2, TJP1, TJP2, TJP3, TRPC4, TRPC5, USH1C, and WHEN.

[0178] In some embodiments, the PDZbm may be derived from any of the 16 classes as defined by the following C-terminal motifs: 1a (φ[K/R]XSDV); 1b (Ω[R/K]ET [S/T/R/K]φ); 1c (φφETXL); 1d (ETXV); 1e (TWΨ); 1f (ΩΩTWΨ); 1g (φφφ[T/S][T/S]ΩΨ); 1h (φφ[D/E][T/S]WΨ); 2a (FDΩΩC); 2b (WXΩFDV); 2c (WΩφDΨ); 2d (φφX[E/D]φφφ); 2e (φφφφ); 2f ([D/E]φΩφ); 3a (WΩ[S/T]DWΨ); 4a (ΩφGWF); φ, hydrophobic (V, I, L, F, W, Y, M); Ω, aromatic (F, W, and Y); Ψ, aliphatic (V, I, L, and M); and X, nonspecific.

[0179] In some embodiments, the PDZbm may be derived from Regulatory T cell Associated Molecule (CRTAM). In some embodiments, the CRTAM PDZbm may bind to a Scribble PDZ domain such as, but not limited to, the third PDZ domain of Scribble. In some embodiments, the CRTAM PDZbm that may bind to the third PDZ domain of Scribble may comprise the sequence of ESIV (SEQ ID NO: 1).

[0180] Non-limiting examples of binding motif, e.g., PDZbm, sequences that may be used in the anchoring domain of any of the PDZ CAR disclosed herein may be derived from any of the PDZ binding proteins described in Table 5. Ensemble ID (ENSP00000 ######) and the C-terminal 5 amino-acid motif for each PDZ binding protein are provided. Depending on pattern of the amino acids at the first, second, third, fourth, and fifth positions in the C-terminal motif, the PDZ binding proteins can be classified into 16 classes: 1a (q [K/R]XSDV); 1b (Ω[R/K]ET [S/T/R/K]φ); 1c (φφETXL); 1d (ETXV); 1e (TWΨ); 1f (ΩΩTWΨ); 1g (φφφ[T/S][T/S]ΩΨ); 1h (φφ[D/E][T/S]WΨ); 2a (FDΩΩC); 2b (WXΩFDV); 2c (WΩφDΨ); 2d (φφX[E/D]φφφ); 2e (φφφφ); 2f ([D/E]φΩφ); 3a (WΩ[S/T]DWΨ); 4a (ΩφGWF); φ, hydrophobic (V, I, L, F, W, Y, M); 22, aromatic (F, W, and Y); Y, aliphatic (V, I, L, and M); and X, nonspecific (Tonikian, R. et al. PLoS Biol 6, e239-e239, which is incorporated herein by reference in its entirety).

TABLE 5
Exemplary PDZ binding proteins

| | Amino | | Amino | | Amino | | Amino |
|---|---|---|---|---|---|---|---|
| Ensemble | Acid | Ensemble | Acid | Ensemble | Acid | Ensemble | Acid |
| ID | Sequence | ID | Sequence | ID | Sequence | ID | Sequence |
| 000233 | ELSKR | 288745 | QDKQS | 332915 | QFFRL | 362174 | QHPSE |
| 000412 | HLLPM | 288757 | AIPAN | 332931 | HIKGF | 362181 | DEHTL |
| 000442 | EAMMD | 288774 | LRHYR | 332932 | YMKGG | 362185 | APVFP |
| 001008 | VETEA | 288828 | ILRTD | 332958 | QDQNN | 362200 | EVYLI |
| 001146 | LSATV | 288840 | LNNPR | 332962 | HVAML | 362202 | LFGLQ |
| 002125 | ELAWQ | 288861 | HFWGC | 332963 | LPFLS | 362205 | GLRDT |
| 002165 | LTNVI | 288873 | QRSWV | 332967 | SNSYW | 362206 | ETLGH |
| 002596 | TFDWH | 288893 | DLAYT | 332969 | LRPFF | 362207 | TFWVT |
| 002829 | HPPDT | 288911 | ECSKV | 332973 | CSSVS | 362208 | LKDSQ |
| 003084 | QDTRL | 288912 | GQDGQ | 332974 | KWTPS | 362212 | KASRT |
| 003100 | KRRSK | 288937 | QTPGI | 332975 | LILVM | 362217 | QLYSA |
| 003302 | TVTVK | 288943 | QVLCH | 332979 | RHRWK | 362219 | QTPSS |
| 003607 | SGLHW | 288955 | TVNSE | 332991 | LNFLL | 362222 | RYLRK |
| 004103 | EVSGI | 288976 | PKPGL | 332995 | PWLKH | 362227 | SDSQY |
| 004921 | LKLNA | 288985 | DILEV | 333001 | DRRRR | 362230 | RVLLR |
| 004980 | HRKLL | 288986 | VKHLS | 333003 | RAILY | 362232 | APDEL |
| 004982 | PAAAK | 289004 | VVPGM | 333011 | SISDG | 362233 | GDHPG |
| 005082 | ESIHT | 289013 | HPGWP | 333014 | CADSF | 362235 | SQSGP |
| 005178 | KEVAM | 289014 | RMFAV | 333018 | VAKNY | 362238 | SLGHF |
| 005180 | TPKQL | 289081 | LRTQV | 333019 | MIQLF | 362244 | VTEVL |
| 005198 | QEFWS | 289094 | QQYLA | 333024 | CKKSK | 362255 | TEKSD |
| 005226 | NQIHR | 289104 | QCVIL | 333037 | HQRCF | 362261 | PAGEE |
| 005257 | RCCIL | 289105 | AEDYA | 333041 | GLLRL | 362264 | YSTRS |
| 005260 | APIIR | 289153 | KDYRS | 333042 | SPCAC | 362265 | SPYEL |
| 005284 | RTTPV | 289166 | WLPCN | 333055 | CHKVE | 362266 | LKPKA |
| 005286 | IRGSS | 289226 | LGSAS | 333064 | QEKDE | 362273 | VFQKS |
| 005340 | FVDVM | 289228 | HRKTF | 333066 | EQPRL | 362285 | LVHLI |
| 005386 | KRYGG | 289248 | LSPAN | 333071 | SEALP | 362287 | TMYFA |
| 005558 | VGEFF | 289269 | DNSDQ | 333084 | PTRFI | 362294 | YLSSF |
| 005587 | EMYDI | 289290 | GMKRV | 333097 | SLPGV | 362296 | SCHDL |
| 005756 | LGLCD | 289292 | GPSNF | 333114 | DVDEE | 362299 | TSSMA |
| 005905 | FGRRK | 289316 | YTSSK | 333122 | DTLPF | 362300 | TMYFA |
| 005995 | LLGPV | 289352 | YGFGG | 333142 | LLLSP | 362304 | ASPVT |
| 006015 | ANPLL | 289359 | HTKNI | 333154 | SRVEA | 362306 | TMYFA |
| 006053 | VLVPV | 289361 | TICPA | 333157 | VLQQV | 362314 | FEMDI |
| 006101 | WSLLK | 289371 | VFEII | 333168 | VQAAQ | 362326 | KGLGS |
| 006275 | VIPKS | 289373 | CVQTS | 333170 | KKKRY | 362329 | HHQKN |
| 006526 | RFSSV | 289382 | TKMSK | 333181 | RVTSV | 362330 | NNDTN |
| 006658 | KLLHP | 289388 | RSGAA | 333183 | MLTCR | 362332 | AKHRK |
| 006724 | GMALI | 289407 | ADPWY | 333188 | SRLDL | 362335 | SQYID |
| 006777 | RVPMP | 289416 | EWKTI | 333190 | EMEVK | 362337 | RRIPQ |
| 006839 | KESLV | 289422 | DSAPL | 333193 | TSVWI | 362344 | PALSQ |
| 006951 | VWECR | 289429 | KRCFC | 333194 | SSSEA | 362352 | KLDAK |
| 007264 | LEPDS | 289431 | HLVYR | 333195 | PQRGI | 362353 | QASCS |
| 007390 | KRQRD | 289433 | WRWQS | 333196 | KKASK | 362354 | LDTLD |
| 007414 | GAVLW | 289448 | LTYRL | 333197 | DRCCC | 362362 | FERVF |
| 007510 | TRSYC | 289451 | FYPLS | 333199 | TDETL | 362363 | REEIL |
| 007516 | KDVYE | 289473 | LASAV | 333203 | KVNRP | 362366 | PTALL |
| 007633 | SCTLL | 289484 | ESPCT | 333208 | KFSAS | 362372 | MGWNY |
| 007660 | RPQMM | 289488 | KQNTL | 333210 | RRRLQ | 362381 | IAFFL |
| 007699 | TTILE | 289528 | NCSLC | 333212 | TISRR | 362382 | AFADP |
| 007708 | TYRVS | 289547 | NGRQF | 333221 | KAQGY | 362386 | YYEAV |
| 007722 | RDQYY | 289575 | EDSRV | 333223 | YHQVL | 362387 | LCYPN |
| 007735 | NTFGY | 289577 | AKKLV | 333234 | TPKKD | 362390 | INHYL |
| 007969 | EQSLI | 289619 | GEGQL | 333236 | GPVVK | 362392 | PLRPK |
| 008180 | PQSSK | 289630 | VSEFS | 333239 | GLGRR | 362395 | KICQE |
| 008311 | TRKQK | 289657 | DRSRS | 333251 | DLPHS | 362398 | LESTF |
| 008391 | TEKTD | 289672 | DIKDF | 333253 | EMIDS | 362399 | APTME |
| 008527 | RQSTN | 289707 | VQDLP | 333262 | GGLGP | 362401 | EICKV |
| 008938 | HYRSP | 289731 | LLSVT | 333266 | LHYEL | 362403 | THVEI |
| 009041 | PLLEL | 289746 | RGRTA | 333268 | DLQQV | 362408 | CVTLA |
| 009105 | VCLIM | 289749 | EGAED | 333275 | IGHSI | 362409 | VQTEF |
| 009120 | RQRRQ | 289753 | GIPTN | 333277 | RGERA | 362410 | PEFFL |
| 009180 | NREMV | 289779 | SSFLV | 333278 | SMLRK | 362413 | ALSNI |
| 009530 | GPAPL | 289788 | VAESS | 333283 | SLILL | 362424 | LTSRR |
| 009589 | TIADA | 289805 | PGARP | 333284 | EPTSF | 362432 | EWRNQ |
| 009606 | EALMV | 289816 | KPEPT | 333285 | RYRKH | 362446 | LHAGE |
| 010132 | LPPIV | 289820 | PGFKK | 333292 | ASVKV | 362447 | YPGDP |
| 010299 | AITSP | 289893 | PGPKR | 333293 | LYTKN | 362456 | GEKAM |
| 010404 | SKLYL | 289921 | PEGQV | 333298 | GYQTI | 362457 | FLDPT |
| 011292 | LNHPY | 289932 | WGYFA | 333300 | KIKMK | 362460 | NLTPI |
| 011473 | PPTGI | 289952 | QIQIG | 333310 | FRTEI | 362462 | GCDPT |
| 011619 | EDYLH | 289953 | MDPRR | 333311 | SVKRN | 362463 | MATLM |
| 011653 | TCSPI | 289957 | LHSYH | 333326 | EGEEF | 362465 | VETET |
| 011684 | SASEV | 289968 | ESTAL | 333329 | LLVCQ | 362469 | HFEGR |
| 011691 | SKAME | 289989 | NLSVG | 333337 | DARAP | 362472 | NGINF |
| 011700 | LELDS | 290015 | YTCKH | 333339 | STALK | 362479 | VCTAV |
| 011898 | KKYDA | 290075 | HRIFS | 333350 | TKSSQ | 362481 | YFGTD |
| 011989 | VEPLS | 290130 | ATCKS | 333354 | DRAAS | 362482 | NRQHQ |
| 012049 | EYLGL | 290144 | FVLYI | 333358 | LPTGQ | 362485 | IIDLK |
| 012134 | KSQLH | 290155 | KWRPR | 333363 | LCDIK | 362489 | GEGCS |
| 012443 | QLGMM | 290158 | LKNQA | 333367 | TDLKD | 362490 | NSRNP |
| 013070 | QYYCS | 290167 | LHTCR | 333374 | YSALR | 362493 | ETKSV |
| 013125 | HENSY | 290186 | NKAVR | 333376 | YERVL | 362499 | LALQR |
| 013222 | KKPGP | 290200 | QGPQS | 333394 | RNQAV | 362502 | IIGPA |
| 013807 | SGFRL | 290208 | TVPDS | 333395 | MSQRI | 362503 | PNENT |
| 013894 | CDTVD | 290216 | SQAYA | 333401 | VEFKR | 362504 | VPLPT |
| 014761 | KSSDS | 290231 | YQRHY | 333406 | GSQSG | 362524 | PNTFH |
| 014914 | KKEGS | 290246 | VYHYG | 333420 | INSNA | 362527 | RISLI |
| 014930 | WLLKT | 290271 | SHESA | 333424 | SMTAL | 362532 | LFSTD |
| 014935 | LCPAA | 290277 | ARLVP | 333433 | HMPDL | 362540 | PASIM |
| 015926 | PGETS | 290291 | KSGKP | 333434 | GIHTG | 362546 | LKELQ |
| 016171 | RRVPK | 290294 | GRKIP | 333438 | LPSAR | 362550 | QMHRA |
| 016913 | ANAPK | 290295 | NSATP | 333456 | FFPRK | 362555 | GEARV |
| 016946 | SRSSG | 290299 | MREIV | 333470 | SGECG | 362556 | TTEAN |
| 017003 | DGRLR | 290310 | FKMSP | 333478 | VCVRN | 362560 | EACSL |
| 019103 | RTSII | 290330 | REALP | 333482 | AFFTS | 362562 | EPLTL |
| 019317 | KETSI | 290341 | QARRK | 333484 | VAQMQ | 362566 | SASQF |
| 020673 | GRRKP | 290349 | RVEQW | 333490 | DLLRA | 362573 | SYFAS |
| 020926 | HQLHL | 290354 | VVQNW | 333491 | QTLGK | 362574 | DFSYS |
| 020945 | CCVAH | 290363 | HLLNL | 333496 | RVSAL | 362576 | GGNIS |
| 021763 | SETTV | 290374 | DSAYV | 333500 | QTLGG | 362578 | AKRLF |
| 021776 | LGMNN | 290377 | EEEVA | 333519 | MCGDH | 362586 | SDTSN |
| 023064 | EEDPE | 290378 | HRKCF | 333534 | CLRPR | 362587 | FPSKQ |
| 023165 | LDLRY | 290384 | EISST | 333535 | IWITD | 362589 | AMKAT |
| 023897 | PTPHQ | 290390 | APKPR | 333537 | DPTIP | 362592 | EGQGS |
| 023939 | TSYCF | 290399 | ITNGR | 333539 | MRTVI | 362594 | QKAKN |
| 024061 | LGRRQ | 290401 | QRNTN | 333547 | CCQNL | 362601 | IFRPD |
| 025008 | WNKKV | 290422 | PRCAR | 333551 | VAQEH | 362605 | VIIDI |
| 025301 | LLENA | 290426 | GIMRC | 333552 | EWHYL | 362606 | PGPSK |
| 025399 | PDVKA | 290429 | QEPPR | 333560 | AEKSA | 362607 | LMFAE |
| 025429 | DLPMS | 290438 | VMQDT | 333568 | RVSIL | 362613 | VIVSE |
| 025469 | RKSLM | 290470 | SEDFG | 333591 | ELPSP | 362616 | EDIDR |
| 026218 | GEVAL | 290472 | PRAQT | 333592 | LDDWK | 362617 | EECER |
| 026464 | NTSAS | 290510 | VREEL | 333593 | HPYFG | 362618 | EATLR |
| 027335 | KPLRS | 290524 | KATPP | 333595 | QRETL | 362620 | CSCLR |
| 028008 | KKTKH | 290536 | DPSRP | 333602 | KPPCQ | 362621 | EATLR |
| 029410 | WCTFS | 290541 | ISGFE | 333603 | ANSKA | 362624 | RALGI |
| 031135 | KEEKE | 290551 | MAVSS | 333627 | LRIVL | 362626 | GYEDE |
| 031146 | VGHQH | 290552 | GAEAG | 333633 | IVIED | 362629 | ISLLS |
| 033079 | SSKSI | 290559 | KSKYF | 333634 | SGPWP | 362634 | WLAST |
| 035307 | QANST | 290567 | FFCAP | 333638 | DPCDS | 362635 | GDLSD |
| 035383 | RELTV | 290573 | EAGQR | 333639 | GDLCV | 362637 | GVVGT |
| 037243 | NTFGF | 290575 | MEEED | 333657 | SKEIH | 362638 | AEQNE |
| 037502 | KLSKM | 290583 | ANRPY | 333660 | TRLHN | 362639 | VTVVD |
| 037869 | LSIGK | 290597 | YAYMQ | 333664 | EYPGN | 362640 | ICAMQ |
| 038176 | WKLQY | 290607 | IPLPD | 333666 | LAQTA | 362648 | TPYFL |
| 039007 | QKPKF | 290649 | KQQTS | 333667 | GFDEH | 362649 | EVKLA |
| 039989 | GRRSP | 290650 | NWQLL | 333680 | VYENL | 362650 | TIDDY |
| 040584 | EENKD | 290663 | HLQLW | 333684 | KMFCS | 362656 | RIPWS |
| 040663 | DGPQM | 290687 | VAGAP | 333685 | LEIEQ | 362663 | YQPQP |
| 040738 | KKAKR | 290702 | PPKSK | 333697 | RLSHS | 362667 | TLDDY |
| 040877 | GDTKP | 290705 | CSCCA | 333701 | TGFWN | 362674 | LKHVV |
| 042931 | EENLA | 290722 | PHFKH | 333711 | DVEPN | 362677 | RDPQT |
| 043402 | VLGPC | 290759 | SPVET | 333725 | RKTHK | 362678 | GWHHH |
| 044462 | KEKDK | 290765 | IARIP | 333727 | RLLRN | 362682 | LHFVV |
| 045065 | LEVHL | 290776 | NSEPA | 333735 | CFQLP | 362684 | RFTLC |
| 045083 | EITIF | 290780 | LKKSR | 333737 | LFSSP | 362687 | KRSFD |
| 046087 | AKTCL | 290786 | ISHIS | 333738 | PCKKR | 362688 | FEFEA |
| 046794 | AAGYP | 290795 | DDAWK | 333744 | PNTFV | 362690 | QAKQT |
| 052754 | LGNYK | 290818 | KSASS | 333746 | KKRKA | 362694 | LNWLL |
| 053243 | SISAR | 290823 | QQEQV | 333751 | GEANT | 362695 | AGVWD |
| 053468 | EESKS | 290846 | LSPLL | 333752 | RMKEI | 362696 | PELPS |
| 053867 | LRQLL | 290858 | KTTRP | 333769 | QRNSS | 362702 | WMSST |
| 054650 | PEQQS | 290866 | ELRHS | 333771 | SRTQT | 362706 | EFPQN |
| 054666 | WVVSS | 290871 | LTPWH | 333775 | GKSQV | 362707 | TKKKR |
| 054668 | WKYCV | 290881 | RLLPD | 333776 | PYKCE | 362710 | RRCPK |
| 054950 | NHDEL | 290894 | AIRTL | 333779 | PAELL | 362711 | TSARA |
| 055077 | APVAS | 290902 | PDNCV | 333796 | CMFFS | 362714 | VSSTR |
| 055335 | LAWFS | 290913 | AAHKG | 333799 | AKSFI | 362717 | LTNLF |
| 055682 | FQKDI | 290921 | ASDQL | 333800 | RSSLV | 362727 | WETFE |
| 056217 | VEQQA | 290942 | AKVKK | 333802 | IHTRV | 362728 | EGFQL |
| 056233 | KGKRK | 290949 | YIPIF | 333811 | HDILT | 362730 | CFALE |
| 057513 | KKVHP | 290953 | PCSRT | 333813 | LPRPS | 362734 | EERLI |
| 058691 | TKENE | 290968 | IAANS | 333821 | CSRYW | 362743 | TGDSR |
| 061240 | THTKK | 291009 | ILKVE | 333823 | GLEEE | 362744 | KQSSG |
| 062104 | QRAPN | 291011 | HNLAL | 333833 | HWQLA | 362746 | NGCHI |
| 064571 | LVFPL | 291041 | QQYNG | 333837 | TVVLE | 362748 | YNHWV |
| 064724 | KSAHV | 291050 | AEPLI | 333845 | VKTLD | 362751 | GKETC |
| 064778 | VPPHW | 291129 | LRARK | 333871 | NLEVR | 362758 | STCVN |
| 064780 | SNLVI | 291182 | TGGNL | 333873 | FKIVL | 362762 | FQTEV |
| 066014 | FPWNP | 291187 | ENPYK | 333887 | FSGCF | 362763 | RQSLL |
| 066544 | ESDEF | 291231 | KRSLT | 333896 | PLPPS | 362768 | ERANH |
| 070846 | HSLKD | 291232 | GPEQQ | 333900 | IDWED | 362777 | FQMAT |
| 071246 | EPMDP | 291281 | RISVL | 333902 | LVLSA | 362778 | LAGIF |
| 071281 | AKNAP | 291294 | ACSLC | 333915 | KTPQL | 362781 | ASPLG |
| 072516 | SLKNV | 291295 | MMTAK | 333917 | LMIPL | 362784 | GQGSQ |
| 072644 | AAKSS | 291358 | TEPPG | 333919 | ICVRS | 362787 | HVPDL |
| 072869 | PVCPP | 291374 | RSTVA | 333920 | GRWII | 362788 | DRIYR |
| 075120 | TTTNV | 291386 | TVCFY | 333926 | VAVKG | 362790 | RMKCQ |
| 075503 | NYSML | 291416 | NTVRI | 333932 | RMSCS | 362792 | KTFFL |
| 078429 | EYNLV | 291421 | LRSKI | 333934 | KSTQE | 362795 | SYSGL |
| 078527 | FLPWT | 291439 | QLRTQ | 333938 | IESKN | 362799 | IVPHV |
| 081029 | LLNVT | 291440 | TCTLR | 333940 | EEEEG | 362803 | AYPSG |
| 083182 | EGPSC | 291442 | YGSGQ | 333946 | AFASK | 362807 | ASRML |
| 084795 | RGYKN | 291458 | PPKNE | 333947 | AWKTT | 362810 | TTVLP |
| 084798 | VPHGR | 291481 | TPLHV | 333948 | EYFGS | 362814 | NRDFS |
| 085068 | NSLLH | 291495 | GRVRQ | 333950 | SVTTN | 362817 | YEKEA |
| 085219 | VILKH | 291525 | AECTF | 333952 | SGGCC | 362820 | SNERK |
| 086933 | PKGSC | 291526 | EDCHY | 333956 | EIKKR | 362824 | VTESA |
| 095634 | PTHHE | 291527 | EECEF | 333959 | PPPGR | 362841 | LYTSG |
| 155093 | EVGLP | 291536 | SDLQD | 333960 | KSDQP | 362846 | PNGII |
| 155840 | PDEGS | 291539 | EGDCA | 333964 | GEKQV | 362850 | SGSCQ |
| 155858 | PPSDT | 291547 | SDSLQ | 333980 | TGKRP | 362853 | WKSRR |
| 155926 | DPFFN | 291552 | RSGRF | 333993 | ICDTK | 362861 | ILFQY |
| 156084 | PPDKS | 291554 | SAPSS | 334003 | FGLTL | 362863 | PQVYF |
| 156109 | DTDDD | 291560 | LEHNV | 334008 | YRNVE | 362869 | TCRKG |
| 156471 | PEETK | 291565 | QATVL | 334021 | KEKKI | 362870 | ENTVV |
| 156476 | LKGPQ | 291567 | NPHKL | 334040 | DDILC | 362873 | YFWTK |
| 156499 | TMRDK | 291568 | ELTYF | 334042 | AQGSE | 362880 | RRGLQ |
| 156626 | AKAKN | 291569 | KKRRE | 334044 | AAADQ | 362881 | WLRVG |
| 156825 | EMEHV | 291572 | FKKKE | 334050 | NALPL | 362887 | KESMH |
| 157812 | HEFYK | 291574 | EVSVT | 334051 | QYELL | 362888 | PKVFP |
| 158009 | YLFPC | 291576 | EEMLA | 334052 | CLGHY | 362894 | LQAQV |
| 158762 | DLHTL | 291577 | ELTGK | 334053 | DHCGG | 362898 | GLIQT |
| 158771 | QRLGG | 291582 | APFPS | 334061 | MPHPH | 362900 | SHSRS |
| 159060 | NKESF | 291592 | IGPGP | 334068 | FSDGK | 362909 | MEVSC |
| 159087 | PSGWH | 291598 | VGFIS | 334072 | NPFSP | 362910 | IALPT |
| 159111 | PGAPF | 291634 | DGGQL | 334077 | GGVSL | 362918 | QGRGK |
| 160262 | PSRAE | 291654 | SRTTL | 334085 | AILTT | 362924 | AELAA |
| 160298 | GGTPK | 291672 | PLFAW | 334090 | PCRRT | 362934 | PGHFR |
| 160373 | EKPNK | 291688 | DMVDI | 334100 | FDTSA | 362935 | EAMGE |
| 160382 | ERKCP | 291691 | TPGPP | 334101 | PAAAS | 362936 | IPAMM |
| 160740 | AATGR | 291707 | INIPK | 334105 | LQNAN | 362937 | DKEQS |
| 160827 | RCGAS | 291715 | FPVCL | 334113 | LDVTL | 362942 | RYHRP |
| 160874 | PLLKF | 291759 | PWEQI | 334115 | ATKMS | 362946 | EGCGC |
| 161006 | AAARS | 291770 | GGRRL | 334122 | EASAH | 362948 | PKRLM |
| 161863 | KNTTD | 291823 | VTGHH | 334128 | FVNRK | 362952 | VRGMA |
| 162023 | EKTQQ | 291842 | NETSF | 334134 | VAKLS | 362959 | PCLAW |
| 162044 | HLAGS | 291860 | TDTSV | 334135 | SSISS | 362968 | KKMFF |
| 162391 | WDLIT | 291890 | NTQTL | 334140 | IERLK | 362978 | ELDFL |
| 162749 | PSLLR | 291892 | QPLPR | 334141 | LRNES | 362979 | SENPQ |
| 162863 | GPQSA | 291900 | MDTSR | 334143 | GCLCK | 362983 | LVEGN |
| 163059 | HQALD | 291901 | GGRWK | 334145 | PLNVS | 362987 | ISVGR |
| 163416 | QPYGK | 291906 | RFLEP | 334146 | PSQNS | 362991 | SPVKG |
| 164133 | SGGQS | 291934 | EEEED | 334148 | MKIWH | 362993 | VSGRW |
| 164139 | PDEAI | 291971 | SQINP | 334153 | TVEEN | 362994 | VETST |
| 164227 | APGGS | 292035 | DTCRQ | 334163 | LVKTP | 363001 | CTLVL |
| 164305 | MKMKF | 292077 | APYQP | 334170 | TERRT | 363003 | GTTPY |
| 165086 | IISRN | 292090 | KFLTE | 334176 | THYQK | 363006 | GAEEC |
| 165524 | SSQDG | 292114 | ELGEL | 334181 | WAPVP | 363008 | AWARK |
| 165698 | SSGTA | 292123 | FTRRY | 334183 | VTTES | 363015 | STDAE |
| 166139 | EENFV | 292125 | EILLL | 334186 | EESTM | 363018 | PQRLY |
| 166244 | PRRHL | 292140 | ENHAP | 334187 | SGGCC | 363027 | NQIIL |
| 166345 | LAAYI | 292144 | QLRRN | 334188 | ATAKA | 363031 | FQKTI |
| 166534 | STEVD | 292147 | QTPTA | 334197 | CVSLL | 363036 | WKEHG |
| 167106 | YQIRV | 292174 | SLTTF | 334201 | RLRGS | 363040 | HNYKA |
| 167218 | VTDTP | 292176 | AMESS | 334216 | LKIEK | 363041 | KKKET |
| 167586 | LRTKN | 292180 | RNSRT | 334219 | RRRGG | 363045 | SKKKK |
| 167588 | VEENI | 292199 | GSSGS | 334223 | TTFVR | 363046 | SILDN |
| 168148 | NTDFE | 292205 | YLCPV | 334225 | ITFFT | 363050 | VYKTK |
| 168216 | IRMQP | 292211 | PKEDG | 334228 | CTVLF | 363055 | DVNLP |
| 168712 | FLPRL | 292301 | DKEGA | 334238 | QASES | 363064 | SESGC |
| 168977 | QQDSM | 292303 | ISVGL | 334246 | AKKVC | 363071 | QHEVL |
| 169298 | RTIHC | 292309 | PTEAR | 334260 | HLCFL | 363079 | CEFPI |
| 169551 | RSQDD | 292314 | TCDSD | 334261 | NAKDS | 363081 | TCQRH |
| 169565 | AVFSL | 292327 | HIMSS | 334271 | SVILK | 363084 | RELLA |
| 170150 | LFYQS | 292330 | RRWEA | 334276 | KGKRD | 363089 | EATSI |
| 170168 | AKTKR | 292337 | GGNPG | 334277 | PSLGP | 363092 | WDIDF |
| 170447 | ESSEP | 292357 | RRQDR | 334280 | KMGKS | 363100 | EEDLD |
| 170564 | PLRRQ | 292369 | SVARL | 334285 | PKDRN | 363108 | KVSPF |
| 170630 | YMRVS | 292377 | LLGPR | 334287 | YSSCY | 363115 | PGDQT |
| 171111 | QNCTC | 292389 | SVKKS | 334294 | SMEIK | 363118 | EVVTI |
| 171214 | RVRPR | 292401 | PWEAS | 334300 | YRRCF | 363120 | PLYVF |
| 171757 | SSMIG | 292414 | TIRSR | 334304 | GKAKK | 363121 | FFFFF |
| 171887 | AGQKR | 292431 | AEALQ | 334305 | ELSAG | 363122 | LKQLF |
| 172196 | PGAVY | 292432 | QLTRV | 334308 | GPPPT | 363124 | LCCST |
| 172229 | ATSPV | 292433 | AVVAF | 334314 | QWRVI | 363126 | HHLLQ |
| 172853 | YVEAI | 292450 | EGEAP | 334319 | TEGYT | 363128 | EGIAD |
| 173229 | KCKKA | 292475 | LRKYH | 334329 | TDGDC | 363129 | TRPDR |
| 173527 | LLSKV | 292476 | FLSGQ | 334330 | CRQRI | 363131 | DDWSD |
| 173569 | ENDFS | 292478 | ALGGR | 334364 | GSIID | 363135 | PFGQS |
| 173785 | MKRHL | 292494 | LRFGP | 334373 | EGFQF | 363136 | SPSDV |
| 173898 | GFSYG | 292513 | GLSHF | 334375 | PAVVS | 363140 | EVVTI |
| 174618 | TLKLA | 292520 | FFRRL | 334379 | YSQKD | 363142 | YQTLI |
| 174653 | FQVRT | 292524 | DYFSL | 334382 | LLECS | 363149 | FVHPI |
| 175091 | PYLPA | 292530 | GPLAN | 334386 | ATEGN | 363157 | GAFLL |
| 175506 | SAVKA | 292539 | CCLLM | 334393 | SSVKF | 363161 | PFLAR |
| 175756 | EWTRV | 292543 | FQIQK | 334394 | YSSCT | 363162 | YRING |
| 176183 | LRACC | 292562 | QERHF | 334397 | HDGKH | 363165 | RKHVQ |
| 176195 | TLRPR | 292566 | QGRPV | 334405 | PGSHP | 363168 | PDECV |
| 176763 | SADAS | 292574 | SSADP | 334409 | FSEAC | 363175 | LAPRT |
| 177648 | EKPCT | 292579 | VHRKL | 334410 | LHLCC | 363189 | VFNLR |
| 177694 | NYFPN | 292586 | FDDDV | 334412 | KYACK | 363192 | VGWSC |
| 177742 | KGTPV | 292596 | LLPWA | 334415 | DDHHK | 363193 | IFGRY |
| 178638 | TEAHA | 292599 | LLGSQ | 334428 | MLQSI | 363205 | KWTQH |
| 178640 | QQGPP | 292609 | PFPSS | 334430 | GTERD | 363208 | PDECV |
| 179259 | LTETR | 292616 | IWGRM | 334437 | QGSGK | 363209 | CDKFY |
| 180166 | LLMYT | 292633 | NLYEC | 334441 | GRNIS | 363211 | LYKCT |
| 180173 | VFLTA | 292641 | LTVFG | 334448 | FCAIL | 363213 | EEGES |
| 181092 | QQMAP | 292644 | YMTYN | 334452 | ISILK | 363214 | WCLWG |
| 181383 | VIRNV | 292672 | PGHPY | 334456 | QVPFH | 363216 | EGKTF |
| 181796 | QAQES | 292728 | FALRR | 334458 | DIITA | 363221 | ASPQR |
| 181839 | RGLPY | 292729 | PNYHW | 334461 | LCCAS | 363226 | GTQPY |
| 182096 | DIEIL | 292748 | ITASL | 334463 | LGLML | 363229 | YYTRS |
| 182290 | RGLSD | 292778 | EPSLL | 334472 | LERYL | 363231 | PPGQG |
| 182377 | STLKV | 292779 | DEDGV | 334474 | LFENN | 363238 | WGQGS |
| 182527 | KLKSP | 292782 | KSTTV | 334495 | LQGRI | 363239 | SQASL |
| 183605 | KHDYV | 292807 | YETRC | 334499 | FWTKN | 363241 | KSNML |
| 184183 | RVQLE | 292808 | REGFL | 334501 | ISLLS | 363250 | EAMQL |
| 184266 | FHLSY | 292823 | EDEED | 334506 | FPSEL | 363254 | AEKSV |
| 184956 | GLTNQ | 292853 | RVRLS | 334514 | TVCFY | 363257 | VGGHP |
| 185150 | LSLPN | 292879 | PGSIM | 334523 | GRRHR | 363259 | TEGIS |
| 185206 | RLSRS | 292894 | RIPSA | 334538 | KTEAV | 363263 | SDHLS |
| 185885 | QKYAM | 292896 | AHKYH | 334540 | CVLCR | 363277 | PSTTL |
| 185907 | EVVTI | 292902 | GGWCG | 334547 | SHHIP | 363284 | EEVDN |
| 186436 | FPHEN | 292907 | SFPRN | 334553 | DFSSW | 363288 | WLKEE |
| 187397 | WQVKF | 292928 | TTGIQ | 334560 | SGYYY | 363296 | TNHAI |
| 187608 | DSSIS | 292964 | PYWGI | 334563 | KYLQK | 363298 | ISIVR |
| 187762 | AKKAD | 293062 | SKLDS | 334564 | TMKRQ | 363308 | EVAAF |
| 187830 | TEGTR | 293068 | RALLK | 334565 | LLSLS | 363313 | LWMAE |
| 187879 | FLNDI | 293190 | LESEV | 334575 | RAPGG | 363317 | STDIF |
| 188312 | EKFDI | 293195 | RLLGH | 334590 | KMTQH | 363322 | GSLEF |
| 188403 | IWDVQ | 293201 | EARPA | 334592 | CAERR | 363323 | EGKTC |
| 188790 | FSLSD | 293215 | QRFRH | 334611 | SKTGI | 363329 | TEHCH |
| 189444 | QPQVH | 293217 | LQSKL | 334612 | KARPE | 363330 | LFCFS |
| 190165 | LNTSS | 293218 | HTLQS | 334625 | DKQMS | 363338 | SPSPQ |
| 190839 | HQGPL | 293230 | PSSGP | 334632 | LSIKM | 363341 | LERAL |
| 190983 | QNSAF | 293233 | GAVSS | 334640 | LPSGC | 363344 | DKSHE |
| 191922 | IFSNF | 293255 | KMMSR | 334642 | PSESV | 363345 | DIIEK |
| 192314 | PFLGA | 293261 | SSNIS | 334644 | SGGCC | 363348 | EDHKA |
| 192788 | PFFEL | 293272 | SLEMS | 334650 | HLVKK | 363350 | LLTLD |
| 193322 | QENSN | 293273 | LPELD | 334657 | FAKLD | 363361 | FLKLA |
| 193391 | QVEEV | 293274 | GCRLR | 334660 | PTQKQ | 363362 | SSDTA |
| 193422 | PIQLS | 293275 | LLNSQ | 334662 | NLCPH | 363369 | TKQKK |
| 194097 | PIIQK | 293276 | DMKEN | 334665 | ALWEY | 363371 | RPPDL |
| 194118 | RLGFG | 293277 | KPYSI | 334668 | GSMRN | 363374 | FEPAP |
| 194130 | NETMP | 293280 | KTRKN | 334675 | QLNNN | 363376 | PCRRT |
| 194152 | SLVFS | 293288 | FSLRV | 334681 | NRKKH | 363381 | VPWLL |
| 194155 | SFEFT | 293303 | STLPV | 334685 | RHQVY | 363384 | MDTST |
| 194214 | SNLSS | 293308 | DVLPK | 334695 | EKSFD | 363386 | RESEV |
| 194530 | SYWEF | 293328 | PHAQS | 334696 | SSGFY | 363387 | SSWET |
| 194900 | SPEKL | 293330 | GQSGI | 334708 | SIAMI | 363390 | EEGHQ |
| 195419 | EEMCD | 293331 | QPPPV | 334711 | SSNII | 363391 | AQGPH |
| 195455 | TAVHQ | 293349 | GQLQD | 334714 | IEPST | 363394 | QGPSD |
| 195649 | IKDFL | 293350 | LPMGD | 334720 | NIEMQ | 363395 | VGSDP |
| 195654 | GMIKT | 293362 | AETLY | 334721 | RDVQD | 363397 | EILDV |
| 195656 | ALAKS | 293371 | LDSVL | 334726 | FHRPA | 363398 | SLEKP |
| 196061 | SFVDP | 293373 | AFHLN | 334741 | WETMT | 363399 | WSAVA |
| 196169 | PRARN | 293379 | ATSDA | 334743 | TVCFY | 363400 | HLSSL |
| 196371 | QQIAN | 293404 | SDPGS | 334754 | RLVKD | 363405 | RLRFF |
| 196482 | QPAEV | 293406 | AALSS | 334762 | SLITT | 363406 | STQPL |
| 196489 | RSNIV | 293414 | EGCIQ | 334767 | HTEKS | 363407 | PECQI |
| 196548 | IREST | 293422 | MVLNG | 334769 | QPHLL | 363414 | DQKTK |
| 196551 | AKSNR | 293431 | WLRTD | 334774 | MLILN | 363416 | IRHQF |
| 196968 | GNGKQ | 293471 | RICTE | 334781 | LCHKM | 363423 | TTDVS |
| 197268 | APYEI | 293493 | QSTAV | 334798 | PSKAP | 363431 | RSNPI |
| 198536 | SVLKA | 293502 | PADSV | 334800 | EPLVQ | 363433 | GAAPE |
| 198587 | QATLL | 293525 | SCKRC | 334801 | KKRKA | 363435 | NCISR |
| 198765 | KQQKQ | 293549 | LHECL | 334805 | QRTIQ | 363438 | KTECL |
| 198767 | QPSPL | 293599 | ELTTR | 334808 | YERIL | 363443 | RTTEP |
| 198801 | HLEFC | 293614 | PRPPE | 334813 | PWQAL | 363452 | AWGRH |
| 198939 | RDECK | 293618 | PRSPK | 334817 | NLPDI | 363456 | LERAL |
| 199280 | RGTKA | 293636 | VIASN | 334828 | VCTVV | 363457 | STDIF |
| 199320 | GIHFS | 293662 | EESQL | 334834 | YQFTC | 363458 | DLFSF |
| 199389 | DGGVG | 293664 | MPWHL | 334836 | FPSKQ | 363459 | LLTLD |
| 199447 | DPEEN | 293670 | GQGRH | 334840 | LKVQV | 363463 | QPLKK |
| 199448 | EDCSW | 293677 | RKRIF | 334844 | REDTL | 363465 | SSLGN |
| 199706 | RASGQ | 293686 | NVLIR | 334848 | EKSCD | 363478 | EDLWQ |
| 199708 | VSEYR | 293695 | RDGEC | 334849 | SETKL | 363489 | SCGCR |
| 199764 | RVALI | 293709 | YLNHP | 334851 | CLISS | 363495 | TSAPF |
| 199814 | KHSSP | 293722 | LPQSC | 334853 | MVLPL | 363500 | KRLTK |
| 199936 | KKKAT | 293725 | WRETI | 334854 | RRPRL | 363503 | NFMME |
| 200135 | LAKIK | 293739 | HKPNF | 334866 | QATCY | 363506 | NDEGL |
| 200181 | QFFQT | 293743 | VDTEW | 334868 | GYQLV | 363510 | VSPQS |
| 200453 | SGRRG | 293745 | KKASR | 334869 | SGGCC | 363511 | EIIHV |
| 200457 | VTTDC | 293756 | IQEGE | 334874 | WMGGQ | 363512 | NSVAI |
| 200557 | RSGGA | 293760 | SDSER | 334876 | LDNDG | 363516 | FDCAL |
| 200652 | LITAF | 293761 | NSVAI | 334879 | EEYSD | 363520 | HTKKE |
| 200676 | LQSLS | 293771 | DHKPT | 334883 | FQACL | 363524 | EEEAH |
| 200691 | CSCCQ | 293774 | LNKRR | 334890 | IMLIS | 363529 | SRFES |
| 201023 | ENNTH | 293777 | QMLEN | 334892 | RGRPA | 363532 | LVEAK |
| 201031 | EKHRK | 293778 | PDSNT | 334902 | LGLGS | 363533 | KTVES |
| 201586 | HPRPS | 293780 | PCIQP | 334910 | SLDAE | 363545 | LQEAV |
| 201647 | EMEVI | 293800 | THIET | 334934 | RAKLS | 363550 | THEHL |
| 201943 | GVYIR | 293804 | NFDQA | 334940 | ATHSN | 363554 | PTEGI |
| 201979 | NLAVL | 293805 | ILGGP | 334941 | GLESR | 363556 | QRLTL |
| 202017 | VILKG | 293813 | ARERL | 334952 | HETTV | 363558 | AMKCS |
| 202556 | QRTLA | 293826 | GFVKL | 334958 | GGPNP | 363559 | IDSLT |
| 202625 | VATAK | 293829 | SPPAP | 334960 | LPTSM | 363571 | GTVSV |
| 202677 | LSGTD | 293831 | VADLI | 334974 | IETTV | 363573 | KSSGH |
| 202773 | HKLVF | 293845 | QRVRI | 334985 | FSGFY | 363582 | NWPPE |
| 202788 | SHESQ | 293860 | HRWRD | 334991 | VKAYK | 363583 | LLNRA |
| 202816 | KQKVK | 293872 | EAGEI | 334992 | PLIYS | 363587 | RRTGF |
| 202831 | HLKSM | 293874 | LKELA | 334993 | PSLEA | 363590 | SEAVG |
| 202967 | LIDPC | 293879 | EVPGL | 334996 | ILQRI | 363591 | RFFKS |
| 203001 | PESDS | 293882 | STFLG | 334998 | CRCCA | 363596 | DLSDC |
| 203166 | QKLCS | 293886 | GGLTR | 335001 | FSGFY | 363597 | NRSYC |
| 203407 | FWLRF | 293889 | TSTKS | 335004 | ETPLL | 363603 | LTGVK |
| 203556 | AEDHL | 293892 | LTGQL | 335006 | SAGCC | 363614 | ATCKL |
| 203629 | EPEQL | 293894 | TLTRP | 335010 | RKLLP | 363616 | FLDSS |
| 203630 | RRYDW | 293897 | QTSKL | 335017 | QKSSV | 363617 | LSRDW |
| 203664 | AADKH | 293900 | GAPAR | 335024 | NPVAG | 363624 | ITVLP |
| 204005 | ARPRA | 293922 | LERCP | 335038 | LLLGH | 363635 | TQELM |
| 204279 | DNGWD | 293924 | EGEAL | 335040 | PTPRQ | 363638 | LLPPV |
| 204517 | DGELP | 293937 | DFGWG | 335041 | PISSW | 363640 | GGGIF |
| 204549 | AVKLH | 293968 | GLVRL | 335042 | PYRCE | 363641 | INELV |
| 204566 | SQEEQ | 293970 | DPDTQ | 335044 | SEMLQ | 363642 | EGQLQ |
| 204604 | EAEGS | 293973 | RCSAA | 335055 | NDWSD | 363643 | RADRL |
| 204615 | LSQEG | 293981 | PGKSL | 335060 | RSQEA | 363645 | KLFFL |
| 204637 | LLVEH | 293995 | QKLHL | 335062 | CSWPL | 363646 | LYGSA |
| 204679 | LRGSL | 294008 | KVERN | 335064 | PSFFI | 363647 | QANRK |
| 204726 | EGPGE | 294016 | VSKSV | 335074 | APADK | 363654 | EEDNE |
| 204961 | IYYKV | 294053 | VCNTI | 335076 | PSRHF | 363662 | RFSRR |
| 205061 | TGSPA | 294064 | QFKSN | 335082 | NLHLQ | 363663 | EKPCE |
| 205064 | LESTF | 294066 | HQSTY | 335083 | NSDMH | 363666 | GMECN |
| 205135 | APFHM | 294072 | LHDGE | 335085 | SKGKH | 363669 | GIIIK |
| 205143 | ILSVK | 294117 | FCALL | 335088 | ETTSN | 363670 | GMERN |
| 205194 | FSKDL | 294119 | REGAL | 335089 | GLRHL | 363671 | GMEMN |
| 205214 | GGNQK | 294129 | GEAPS | 335094 | CIEEI | 363672 | GMELK |
| 205402 | KSINF | 294161 | LAVVK | 335106 | EFGSC | 363673 | GNGLS |
| 205557 | ESGLV | 294168 | LYLPL | 335144 | NPTRK | 363676 | ILPGK |
| 205636 | EPLNA | 294172 | VAFMK | 335147 | GKRKC | 363678 | FRPRT |
| 205890 | EITLL | 294173 | YPFQL | 335153 | MEEVD | 363680 | EAPAS |
| 205948 | DVKPC | 294179 | VVFLA | 335156 | LKAPA | 363682 | GGGAN |
| 206020 | LPPTS | 294189 | TKASE | 335173 | SSVSE | 363683 | HNCEE |
| 206249 | FPATV | 294241 | DNHNL | 335181 | KSKTQ | 363689 | RSFCH |
| 206262 | SSSES | 294244 | KGNGV | 335185 | HCTMC | 363708 | GMNCL |
| 206380 | LATDG | 294247 | NELKL | 335193 | NPADT | 363709 | LMGTP |
| 206423 | HGYPY | 294258 | RVGPS | 335196 | TTLNQ | 363724 | ARALF |
| 206466 | RSGTR | 294288 | RMMSR | 335197 | QVKKK | 363727 | PETKL |
| 206474 | SKVYR | 294304 | CTDSS | 335201 | SFQKQ | 363729 | RWKFC |
| 206513 | VGGCS | 294309 | LWLCR | 335203 | LKHDD | 363734 | APGKA |
| 206542 | VTWRD | 294312 | PSFEK | 335216 | PAVHL | 363739 | LDIKW |
| 206544 | PNPAL | 294338 | RSTPM | 335223 | GGGCC | 363743 | GQQWK |
| 206595 | HYIGH | 294342 | HQQRC | 335229 | GLRTH | 363746 | DRFVR |
| 206660 | EDLFS | 294353 | QARLN | 335241 | PGDWH | 363747 | ILNVQ |
| 206765 | SRGGA | 294360 | QFVKC | 335243 | AGNIS | 363752 | CAEEN |
| 207437 | HILSV | 294383 | DDVDP | 335246 | LGISH | 363753 | TTATS |
| 207457 | QLELA | 294390 | HHNMM | 335247 | DTSLT | 363756 | AWLQS |
| 207549 | LRPAP | 294409 | VVLED | 335255 | NPYFK | 363761 | CSCGG |
| 207636 | SEAGP | 294413 | LAVGF | 335256 | VMRLG | 363762 | VSKKK |
| 207726 | PATRP | 294419 | SKEAY | 335261 | LGLQA | 363765 | VDFLF |
| 207771 | SGKFQ | 294428 | KKRVY | 335272 | LDELP | 363767 | HTYGL |
| 207870 | RGPPE | 294445 | TRLQK | 335273 | KKQQI | 363768 | LLFPD |
| 209540 | NRDME | 294454 | QHKGT | 335276 | RGGGT | 363772 | RNAEK |
| 209668 | TILMF | 294485 | SFINV | 335281 | CRQRI | 363774 | TFTPQ |
| 209718 | IQKHA | 294489 | GRYSP | 335285 | IIYPD | 363779 | LSLLD |
| 209728 | ATGLP | 294507 | PYSEV | 335292 | PETES | 363780 | CGEAK |
| 209873 | PHSHL | 294543 | STGLD | 335304 | LLLDL | 363787 | TKDPK |
| 209875 | ETAKS | 294600 | KGTSK | 335306 | SLQWE | 363792 | ETENS |
| 209884 | ESHIW | 294610 | KELLM | 335307 | GSIID | 363794 | GGLFM |
| 209929 | PCNSY | 294635 | QPPIE | 335309 | PSCVT | 363799 | IYSKC |
| 210060 | EKNED | 294638 | PISHT | 335320 | ANLPF | 363807 | IAHLE |
| 210187 | SCCRP | 294661 | AKKKK | 335321 | LDYIL | 363817 | PHQLA |
| 210313 | VEGAE | 294664 | YMEVM | 335325 | NNRLK | 363822 | YFHTQ |
| 210444 | KKIKS | 294665 | VLFIK | 335332 | LLATT | 363824 | TKKNE |
| 210633 | DESSV | 294671 | KKIIS | 335333 | GESDT | 363826 | PLSQV |
| 211076 | KVNGT | 294702 | QHGLK | 335339 | NSKGA | 363827 | RPCPS |
| 211122 | KIFRF | 294715 | SSTIK | 335347 | NELKL | 363832 | WNVPI |
| 211238 | ENKIY | 294725 | EETQL | 335357 | RSVSR | 363836 | PAIIS |
| 211287 | SGMKL | 294728 | QKSKV | 335358 | SGGCC | 363842 | NVVTQ |
| 211314 | VLLLL | 294736 | VLECK | 335369 | TGKGS | 363852 | GASSA |
| 211372 | VSKKK | 294737 | NGNQT | 335371 | SIAAA | 363868 | KESYV |
| 211373 | GLWSG | 294740 | SQSYR | 335376 | YLTGY | 363869 | GKSVC |
| 211377 | MNLEF | 294774 | ERVTS | 335382 | TIFTV | 363871 | PATVC |
| 211402 | FQKML | 294785 | GAVSY | 335384 | QQYED | 363872 | TVSLF |
| 211475 | AKALK | 294794 | VIFAY | 335385 | WIQHR | 363873 | TRCGG |
| 211936 | LHPGI | 294811 | PAVAL | 335392 | IHTHL | 363879 | RGRLR |
| 211998 | TPWYQ | 294816 | SYFTS | 335397 | VPHHL | 363880 | YSYVA |
| 212015 | PSNKS | 294818 | FPQLI | 335400 | HDVIS | 363888 | DKPPA |
| 212355 | SSSTA | 294829 | TFEAH | 335409 | QSRWR | 363891 | PPEES |
| 212369 | LELLN | 294848 | KRMEA | 335416 | LERFH | 363894 | FSPLK |
| 214869 | RPVPT | 294889 | VSFVR | 335424 | IYKMN | 363902 | PPRAS |
| 215057 | VHSAE | 294904 | FQPNK | 335434 | GGTVV | 363903 | EQVRS |
| 215061 | GSVYF | 294923 | RHTKL | 335437 | HTINR | 363906 | LSHSG |
| 215071 | LEMIV | 294947 | PVSIM | 335444 | PEDVD | 363907 | VLWEE |
| 215095 | GTLGL | 294952 | KNKSR | 335447 | KGAHL | 363911 | KNFNK |
| 215202 | VSANT | 294954 | RYTEC | 335463 | CHFYH | 363913 | KKPIH |
| 215368 | TLLGS | 294964 | VKASG | 335481 | RDERG | 363918 | LLLKF |
| 215375 | VKALE | 294973 | KKPLG | 335484 | GQRCS | 363921 | RPFYS |
| 215530 | PVLVS | 294993 | WLGST | 335486 | PSHGT | 363930 | QRGSA |
| 215531 | FQGQG | 294997 | CTTGF | 335493 | SGCHF | 363934 | IPMMQ |
| 215539 | HFAPC | 295006 | CFSVL | 335498 | RNLTA | 363939 | LVLIV |
| 215555 | EETPV | 295024 | SSMDS | 335500 | PAELK | 363942 | RQFNY |
| 215565 | PKVAL | 295025 | EFFQV | 335503 | SYGFY | 363944 | GLQLF |
| 215567 | IPFLL | 295030 | EKQDL | 335511 | CLWNT | 363952 | RIYIG |
| 215570 | ERANM | 295031 | TVLLC | 335525 | SSISS | 363965 | LSVLF |
| 215574 | GTEES | 295049 | QVTCM | 335528 | ARETS | 363970 | ETFGF |
| 215582 | SEEDD | 295050 | SEESL | 335529 | SKIHS | 363972 | RKQDE |
| 215587 | YRLVQ | 295052 | VYAGF | 335535 | IGILA | 363976 | PCSGD |
| 215591 | TYFFS | 295055 | LVMYN | 335536 | TVCFY | 363979 | QNPTE |
| 215631 | SLQER | 295057 | RECEV | 335538 | GQKKW | 363980 | HPSLL |
| 215659 | KETPL | 295062 | RHRMS | 335540 | RDVAP | 363983 | GWHIS |
| 215727 | NPSRS | 295066 | FEDRN | 335544 | TLGPG | 363985 | YSKHQ |
| 215730 | KVRQL | 295075 | FEGPN | 335549 | FLLNK | 363988 | ACYTY |
| 215739 | LGADI | 295079 | SKLLE | 335557 | YERGH | 363993 | KFYDE |
| 215742 | SSSMA | 295082 | LQSCK | 335565 | SRLAC | 363999 | ITWSY |
| 215743 | ANTFL | 295083 | AIKAE | 335566 | CYSSC | 364000 | PVCFV |
| 215754 | NSTFA | 295087 | RLKIR | 335567 | NLTKY | 364005 | MTEVT |
| 215770 | FIYFI | 295095 | GSEED | 335568 | YGSPW | 364013 | SSRMV |
| 215773 | VMTFL | 295101 | SDRFT | 335575 | TFFSW | 364016 | REANQ |
| 215780 | IARIP | 295108 | AIFHD | 335578 | DLGFL | 364023 | SSFLV |
| 215781 | GQLPR | 295110 | EHVFW | 335579 | HFLYW | 364028 | KCEVW |
| 215790 | EDTYL | 295112 | ILNFD | 335588 | ALEHF | 364032 | KLAQL |
| 215793 | GGRKK | 295113 | RQARN | 335592 | AASPK | 364033 | FLYFS |
| 215794 | MKMEC | 295119 | YMFGW | 335595 | ILVRS | 364035 | CPGKF |
| 215812 | ELTPV | 295124 | SSASP | 335596 | KNVMM | 364037 | LATVY |
| 215829 | FQKRR | 295131 | EGVQL | 335598 | LNLSI | 364041 | LVKKS |
| 215832 | PGYRS | 295133 | VEGGC | 335605 | TDAAV | 364042 | GNSET |
| 215838 | RLVSW | 295136 | STQTM | 335610 | LDSGH | 364048 | LSLTR |
| 215855 | RFPSS | 295137 | HRKCF | 335612 | PARTH | 364052 | LGSTC |
| 215861 | FHPSN | 295148 | VDGMA | 335614 | RTYSC | 364053 | LPQSC |
| 215872 | RAWNC | 295150 | ILVPE | 335615 | KKSAL | 364054 | LVKTS |
| 215882 | VWKTD | 295156 | CDIQK | 335618 | RPKSE | 364057 | PPPEK |
| 215885 | KSWSQ | 295171 | HRSVL | 335620 | KIFRF | 364070 | VITLL |
| 215886 | FKLKE | 295181 | MNRIQ | 335623 | AATQV | 364076 | HQGLL |
| 215906 | FAPGR | 295190 | DGAHV | 335628 | TGSEE | 364083 | ILEPA |
| 215909 | CVAFD | 295201 | LAGYQ | 335629 | HPMQS | 364084 | GRGGD |
| 215912 | GTPGA | 295206 | KDESE | 335632 | IRFLH | 364089 | GQPSV |
| 215917 | PSATD | 295208 | GKKTL | 335636 | PEDIE | 364092 | LSLNC |
| 215935 | EEDDE | 295210 | KQGID | 335642 | LEKWT | 364094 | FIRVP |
| 215938 | EPAGY | 295213 | GLPRF | 335644 | QEPTP | 364098 | ILMLV |
| 215939 | TEPPK | 295220 | YLILE | 335650 | SLSVS | 364107 | GDAQP |
| 215941 | SMEKR | 295225 | FENVI | 335651 | HVTFY | 364114 | TGLVS |
| 215956 | ERLLV | 295226 | RNFKK | 335655 | APGPH | 364115 | HVDPA |
| 215957 | PRDKS | 295228 | ECGCA | 335657 | YEYPS | 364118 | LKFNN |
| 215960 | LIITD | 295237 | QAEFS | 335660 | FTGFY | 364119 | RAKAN |
| 215980 | SLEDL | 295240 | WEVMS | 335670 | TIHMG | 364122 | LYHSP |
| 216014 | LPMPI | 295246 | VYFSF | 335675 | APLAE | 364125 | ENQGS |
| 216019 | PPSRK | 295251 | LNQWD | 335677 | KGVQN | 364126 | WSRPS |
| 216024 | GDAKE | 295256 | PQTKL | 335808 | FLEAP | 364127 | RRGPL |
| 216027 | KKIPL | 295266 | FKSVS | 336073 | ILDAL | 364130 | LTHQP |
| 216029 | SRKRK | 295268 | AADIM | 336127 | IPRVL | 364132 | SLSGW |
| 216034 | LPGKI | 295269 | LLQKK | 336417 | YTSSK | 364133 | EGIKM |
| 216036 | IEFKP | 295297 | EDDEL | 336522 | CLSDA | 364135 | PQPPK |
| 216038 | AVIKG | 295304 | NLNCI | 336524 | FTALK | 364138 | CQGCL |
| 216039 | WRTDV | 295314 | QQKKR | 336528 | GITGS | 364140 | TDARK |
| 216044 | PASGC | 295317 | GGPIS | 336547 | QILLM | 364141 | FFKGP |
| 216061 | LNGPV | 295321 | NKMPL | 336552 | AKSES | 364144 | IQSSD |
| 216064 | GEPAH | 295324 | MDKNK | 336565 | RPEVP | 364145 | VPAHY |
| 216068 | VWKCS | 295349 | LVTSL | 336571 | LTGYV | 364150 | KERML |
| 216071 | LKSKK | 295367 | KTKQK | 336587 | THSSK | 364152 | RRNIF |
| 216075 | GILSW | 295373 | LVTTQ | 336606 | QATGT | 364153 | SSRKL |
| 216080 | TRRKK | 295379 | ECGCR | 336607 | SELDQ | 364154 | SRRMF |
| 216085 | GPGPP | 295381 | PKTEA | 336616 | VWKPD | 364156 | LEEAD |
| 216099 | REILQ | 295382 | GEGTP | 336627 | ALNKI | 364158 | NSPCA |
| 216101 | RCSLM | 295408 | SEVLM | 336655 | DDWEF | 364163 | GEGKK |
| 216106 | IMPGL | 295440 | SGLGC | 336661 | MAFFP | 364166 | VTWAL |
| 216115 | HLLLK | 295448 | MKDGN | 336666 | EMGLA | 364171 | LQGLG |
| 216117 | GLYAM | 295450 | TATAP | 336673 | LQPQQ | 364177 | PHPYF |
| 216121 | ISPLQ | 295452 | GYLYL | 336687 | EDEAQ | 364178 | HIRSI |
| 216122 | LYRLK | 295453 | TATAP | 336693 | SKQWS | 364180 | PTHTC |
| 216127 | KCTIQ | 295454 | LYYVH | 336701 | PEEEL | 364188 | KEKSD |
| 216129 | VTCLV | 295461 | SRTDD | 336702 | KAMAK | 364190 | SDTSN |
| 216133 | RSGKF | 295463 | ASAAP | 336712 | AFYGV | 364192 | LELPT |
| 216139 | LTSTS | 295470 | NYQPY | 336719 | KKSIK | 364204 | WRAAL |
| 216144 | RSGMK | 295488 | STDKA | 336724 | NHYKK | 364211 | STGGP |
| 216160 | VVTAP | 295491 | IRYRE | 336725 | DWWGN | 364212 | LQKTQ |
| 216171 | QALLF | 295500 | HSPKT | 336727 | SNAVQ | 364219 | APPGV |
| 216177 | PTHQA | 295509 | VQIKT | 336729 | LLPHT | 364220 | NPNYV |
| 216178 | ADQEL | 295522 | GKDYV | 336733 | SWRTE | 364222 | PVSAA |
| 216180 | LEKSL | 295542 | TAYAG | 336740 | PEVPD | 364235 | WLLSI |
| 216181 | AKPAE | 295549 | RPSLC | 336741 | EYSQY | 364236 | HLKIH |
| 216185 | KKLIG | 295550 | SVMGT | 336747 | VTEKE | 364240 | GEGWP |
| 216187 | NKEEL | 295559 | SCFLT | 336750 | RMRKI | 364243 | PPAPP |
| 216190 | EEEET | 295568 | LQKVL | 336752 | ATPAE | 364246 | QTPGC |
| 216194 | AELCL | 295569 | TKVTR | 336753 | AENIV | 364249 | NILCS |
| 216198 | PGLGL | 295572 | PIELN | 336762 | IFRRP | 364252 | STPRC |
| 216200 | LVAES | 295588 | LKTEL | 336764 | VPRPA | 364254 | MHLLL |
| 216211 | SKLQD | 295589 | SVPPQ | 336775 | DGHWF | 364257 | PTPPC |
| 216214 | DAGGS | 295598 | KETYY | 336786 | VCVRN | 364260 | VSLGS |
| 216218 | FGGQA | 295600 | TEHTC | 336790 | KKRVP | 364261 | AALNI |
| 216223 | PTHLV | 295605 | KKTKL | 336799 | EGEEY | 364263 | ISSIA |
| 216225 | QKYGH | 295619 | CLAQK | 336800 | KHLPA | 364265 | FVSAM |
| 216237 | QETDD | 295622 | MLCQV | 336812 | LQLHF | 364270 | TYEKM |
| 216241 | EKGRL | 295628 | KVLLG | 336817 | EEKIL | 364271 | HKRMK |
| 216252 | GFKKR | 295633 | STKEI | 336829 | PEDDL | 364277 | TRDKT |
| 216259 | TAHEA | 295640 | APKGS | 336831 | LNRIK | 364281 | EMLAF |
| 216264 | PDSHS | 295641 | LALDR | 336832 | PFHGT | 364282 | PAPSL |
| 216268 | IYFQY | 295645 | SINSF | 336842 | AAFVW | 364287 | RKQQC |
| 216271 | PHLVA | 295658 | ETSTV | 336854 | KEIVA | 364289 | CALQA |
| 216274 | NHSGK | 295666 | EGAEL | 336856 | NRLDR | 364291 | DRALG |
| 216277 | LRLNR | 295682 | SKKRN | 336861 | SKPKK | 364293 | VRRKK |
| 216286 | PTGRK | 295683 | VSSNL | 336865 | CIRHR | 364295 | PLLPS |
| 216294 | KRRKH | 295685 | TFSSR | 336866 | LKVPA | 364298 | RKMFG |
| 216297 | KKKRK | 295694 | PRPWG | 336868 | EEGLG | 364300 | PPGLK |
| 216327 | CDSVD | 295704 | SKDGS | 336871 | DLSPH | 364304 | PGQSQ |
| 216330 | LVDID | 295709 | PAHSM | 336888 | KAAES | 364310 | ASQEY |
| 216336 | METPL | 295713 | KSCTV | 336894 | PEDSR | 364320 | SEDDD |
| 216338 | TMKRL | 295718 | KALPQ | 336914 | GAAAP | 364321 | QGCQV |
| 216361 | LESQQ | 295727 | GGHYH | 336923 | YVKLL | 364325 | CLPVN |
| 216366 | TTPIY | 295728 | RRVQH | 336931 | LKVQT | 364327 | RGERA |
| 216367 | KLQGF | 295731 | SGAGS | 336936 | RADIL | 364334 | KVLCL |
| 216373 | AETPQ | 295736 | AETSL | 336972 | PTEAS | 364346 | IQASE |
| 216392 | KVNGN | 295738 | FRSQK | 336984 | IPNRK | 364348 | QGLYV |
| 216407 | DYKPV | 295743 | FYTTP | 336987 | ICKIV | 364349 | YLNHP |
| 216410 | RRFLK | 295746 | VNLSI | 337008 | AEAAS | 364354 | NRAWR |
| 216416 | VLVSS | 295748 | CLYKN | 337014 | WLCIQ | 364356 | TTEWS |
| 216420 | KPKTL | 295749 | PAKQK | 337019 | FVINK | 364358 | ASQMS |
| 216442 | DLLFE | 295755 | CCHLT | 337022 | SPTSQ | 364359 | ALPCL |
| 216445 | FFDQE | 295756 | REPIN | 337023 | SHLFL | 364361 | GWRNF |
| 216446 | IKKLT | 295757 | PPAVP | 337034 | LLLYT | 364363 | NKTRK |
| 216452 | TSTSP | 295759 | ELSGH | 337040 | YSGTP | 364370 | PRPQL |
| 216453 | DLLSL | 295761 | TTFAL | 337044 | KPPNE | 364371 | SPCQA |
| 216455 | DDDNM | 295766 | LPTRW | 337053 | QQPPQ | 364376 | NSPRC |
| 216456 | FFRSH | 295767 | EEGSS | 337056 | MVAPL | 364380 | PPGFK |
| 216463 | LGQPR | 295770 | SKKTV | 337065 | RVYEE | 364382 | SVIHV |
| 216465 | TELRA | 295771 | MTVEK | 337088 | QRKGL | 364387 | ERRAG |
| 216468 | IYYTS | 295774 | DKTRQ | 337103 | QGHQP | 364389 | KTVLR |
| 216471 | PCTEP | 295777 | DFEEL | 337113 | RFRKS | 364391 | CKCKM |
| 216479 | GARLF | 295802 | QKKKN | 337122 | IEEDP | 364396 | PAGGG |
| 216484 | EETED | 295806 | HPAVP | 337127 | MACKK | 364397 | MNSPF |
| 216487 | EPNFL | 295809 | PDFFF | 337128 | QEGAP | 364398 | FPALS |
| 216489 | INPDS | 295822 | IKPCK | 337133 | NPTKS | 364403 | LNSVP |
| 216492 | ALRRG | 295824 | CKTLM | 337144 | GPHSS | 364404 | INRSC |
| 216513 | DMQDL | 295833 | FHKKQ | 337146 | GLKLT | 364405 | APLRQ |
| 216520 | QQAGK | 295834 | ISKRI | 337159 | IEHLF | 364407 | QVKMH |
| 216538 | VDSGN | 295839 | KTEEQ | 337181 | LQRTS | 364412 | NTKVR |
| 216540 | SPCTA | 295844 | DLLPP | 337196 | FIYYE | 364417 | NICCK |
| 216554 | DIDAI | 295851 | MHYSE | 337209 | IRLRK | 364418 | QQLFD |
| 216602 | ESRDQ | 295859 | NDESF | 337212 | KVSCP | 364429 | GEDGS |
| 216605 | VNGLF | 295862 | PMEQD | 337222 | VFVKV | 364430 | DARDL |
| 216612 | LLPDD | 295872 | STHVS | 337224 | LWMAG | 364431 | RQRLA |
| 216629 | LFWRN | 295874 | MESLV | 337226 | ILVET | 364438 | IKEDN |
| 216639 | KRVQK | 295878 | SLVNE | 337239 | KMPAK | 364444 | QGCQV |
| 216714 | LYLAL | 295884 | TDLSI | 337240 | DYRSI | 364448 | REEAE |
| 216727 | WYSPY | 295886 | PESSS | 337255 | TKPSP | 364449 | EQAGV |
| 216733 | TSLAP | 295887 | PTLKV | 337262 | QKYAM | 364464 | AEMLF |
| 216756 | GHRAL | 295888 | GPRNC | 337265 | GAAKH | 364467 | DCEVS |
| 216774 | GFNNM | 295890 | FISRK | 337266 | YEDVT | 364473 | KSRIW |
| 216775 | PSPSP | 295894 | FTNQI | 337281 | DGEDG | 364475 | KHSAQ |
| 216780 | RVHKM | 295896 | GPGDS | 337289 | KLDAS | 364476 | NTSSR |
| 216797 | QRLTL | 295898 | PLPSK | 337313 | KKASE | 364482 | RLPET |
| 216799 | GNGNA | 295899 | TDPKP | 337320 | KISVI | 364486 | NQAGS |
| 216807 | SIKHS | 295901 | RVINM | 337331 | GVGKK | 364493 | QCTEL |
| 216822 | AEWVS | 295902 | NCIIS | 337332 | KAVPS | 364494 | SAVAA |
| 216832 | KDKRR | 295903 | EVRVL | 337340 | PGKPS | 364501 | PQRRS |
| 216840 | SSVLT | 295907 | AQEPC | 337353 | MWVPS | 364502 | PPYAP |
| 216862 | AFCQR | 295908 | SGRWA | 337358 | GWALE | 364506 | PRPPP |
| 216911 | ASKQS | 295910 | INEEI | 337363 | GGSRL | 364512 | GKKSQ |
| 216923 | DSIPD | 295920 | TTEWE | 337383 | FEPSW | 364515 | IRTPK |
| 216951 | NPYPV | 295924 | NTVSI | 337386 | SISDD | 364519 | NDEDD |
| 216962 | NIPRD | 295926 | GRHRR | 337393 | EKPHH | 364520 | TMRRD |
| 216968 | GGRRC | 295927 | AQYVS | 337396 | KVKRI | 364522 | NSSWV |
| 217026 | TLILS | 295930 | GSPVA | 337432 | IHHVQ | 364524 | MEQFT |
| 217043 | KFTWF | 295934 | TNLLE | 337439 | LMTTV | 364543 | SLYTQ |
| 217073 | KAYMH | 295937 | CQLDD | 337443 | KPEPI | 364550 | PQQQL |
| 217086 | KIAVS | 295941 | FNRKS | 337445 | KVRAQ | 364552 | KRSLF |
| 217109 | RSTTD | 295943 | VEQVS | 337446 | LGARA | 364561 | FLSPI |
| 217121 | DPAPF | 295951 | ARASP | 337448 | PVTSG | 364566 | LSAPG |
| 217130 | KAPEK | 295956 | HVTVP | 337451 | GPVPV | 364567 | STEEK |
| 217131 | GDPIV | 295958 | APPVD | 337452 | NMKTD | 364578 | LVDGF |
| 217133 | EDKGH | 295959 | ELVLD | 337455 | TGPEG | 364580 | LLAQG |
| 217159 | LQSSV | 295962 | NKKLD | 337459 | EVFSS | 364582 | NPRTL |
| 217169 | RTFLS | 295966 | YYELV | 337461 | WIPVL | 364584 | YHYVA |
| 217173 | LRVHF | 295980 | LADLG | 337463 | PGGGG | 364591 | RGKTG |
| 217182 | QKAGK | 295981 | AGDGT | 337466 | CMSIL | 364592 | DLGFL |
| 217185 | YENPT | 295982 | ASSQR | 337475 | RKKQE | 364595 | MAPQQ |
| 217188 | HRCHP | 295984 | DTIEL | 337477 | STQEW | 364597 | WNMVP |
| 217233 | VVLYG | 295987 | SLFSD | 337478 | SAVVK | 364603 | GESPS |
| 217246 | RNGTK | 295989 | SMELS | 337494 | EIRHS | 364609 | WNMVP |
| 217254 | LHCPA | 295992 | KNKQC | 337500 | RIDFG | 364613 | DLGGL |
| 217256 | GQPPQ | 296003 | SSNAL | 337501 | QEPGQ | 364614 | LLWQT |
| 217260 | PGLQP | 296015 | NKSKN | 337510 | GRYVS | 364620 | WNMVP |
| 217270 | CIRLK | 296026 | KGSTN | 337512 | LQLQN | 364621 | AYALG |
| 217289 | TGGQD | 296028 | DESAD | 337513 | FQQAS | 364623 | HHLKT |
| 217299 | YETTV | 296029 | KLLES | 337518 | KHKRK | 364627 | LNYIC |
| 217305 | ELFDA | 296031 | SDKNN | 337541 | AFGGQ | 364629 | CGMGG |
| 217315 | AVKID | 296043 | LTSPL | 337542 | PTRRN | 364635 | WHMVP |
| 217320 | AWLLS | 296046 | LKHTS | 337548 | PYFED | 364638 | WLEEN |
| 217381 | LGLLA | 296051 | KKPLT | 337555 | EKVYH | 364639 | RSSRH |
| 217386 | TFSQR | 296059 | QPGII | 337560 | ARRRL | 364643 | LTVAS |
| 217398 | SRPSN | 296084 | LGAYV | 337561 | PSAIA | 364645 | QLSSI |
| 217402 | WAGSM | 296088 | CCHVI | 337572 | PQSEV | 364649 | KKASV |
| 217407 | QYMRV | 296091 | LHSGD | 337605 | AALPY | 364650 | GCEVS |
| 217420 | TNAED | 296096 | ALGDK | 337618 | NLTAF | 364660 | NFLPL |
| 217423 | RCQEA | 296097 | SEDDF | 337629 | NWELN | 364661 | ENDQS |
| 217426 | DHYRY | 296098 | RPDGP | 337632 | RFGIA | 364664 | SSSPD |
| 217428 | FCKFT | 296099 | DSVGK | 337641 | GIIPT | 364668 | YPELL |
| 217429 | YPSYQ | 296102 | KIRSL | 337649 | ISTPV | 364675 | NVLIR |
| 217446 | MLVLK | 296105 | PEATR | 337653 | HFAML | 364677 | NVLIR |
| 217455 | SESKL | 296111 | NHIRD | 337679 | PWLNS | 364683 | KLEFV |
| 217456 | SLQAV | 296121 | EDENE | 337688 | SHEKS | 364685 | SCGSC |
| 217515 | KGESH | 296125 | VLITK | 337701 | GALGL | 364691 | GPPEK |
| 217537 | LRKGT | 296126 | ESEEE | 337722 | QTVKT | 364694 | GNFGM |
| 217652 | KDKDD | 296127 | YQYVV | 337724 | SEKTS | 364699 | MLWKL |
| 217740 | HSNTT | 296129 | MEPAE | 337731 | PEWDL | 364700 | YENQE |
| 217800 | HIGHK | 296130 | QFGIV | 337732 | GLTPS | 364702 | QQNKY |
| 217893 | DYDNL | 296135 | YEPED | 337733 | IQANS | 364708 | GGTVA |
| 217901 | RAVEA | 296137 | GSDFL | 337736 | YYTSL | 364709 | SSPLK |
| 217939 | YIHVF | 296140 | LSAGF | 337757 | IANFF | 364713 | EQPQV |
| 217957 | GVVKA | 296142 | VKTAI | 337759 | TPSPK | 364721 | EQEEY |
| 217958 | RMVEG | 296143 | WRIQS | 337761 | GACGC | 364722 | EQPQV |
| 217961 | KRLSR | 296144 | FSLQL | 337797 | EPAQA | 364731 | RAPFP |
| 217964 | LDLRK | 296145 | IQSYY | 337804 | KVSPH | 364732 | KKRKK |
| 217971 | ARKND | 296161 | AKGIE | 337816 | GVASR | 364737 | AEENN |
| 217999 | YIVVD | 296181 | NGTVD | 337829 | SKRKR | 364740 | FKQRR |
| 218004 | DWSSS | 296202 | EGKTS | 337831 | SDGQC | 364742 | VRAKR |
| 218006 | VRNKP | 296204 | PREFA | 337838 | KRKAE | 364745 | EQPQV |
| 218008 | LNIET | 296214 | PRADY | 337839 | RKKKS | 364749 | ESAPE |
| 218054 | EKGHC | 296215 | EVSDS | 337843 | SRKGN | 364755 | GGTEA |
| 218056 | RREQK | 296218 | IAPKK | 337850 | ENAAS | 364756 | ASVQC |
| 218068 | GDGQP | 296220 | TQPAE | 337852 | ARGEL | 364758 | PRAHP |
| 218075 | DVHKK | 296223 | KKLAF | 337854 | GRPAL | 364762 | EQPQV |
| 218089 | GISTF | 296233 | VRSVN | 337862 | GSPHL | 364765 | EIYGY |
| 218099 | KTKLT | 296238 | PPSGV | 337889 | RPALS | 364770 | PALGK |
| 218104 | QGAST | 296252 | PELQL | 337907 | SWLHS | 364771 | YFGGT |
| 218147 | QSCNS | 296254 | SRKDT | 337915 | TVSGA | 364776 | CSVFL |
| 218172 | LRAAR | 296255 | ILDAL | 337926 | KRANK | 364781 | VGMLV |
| 218176 | KISSL | 296257 | HQQLL | 337946 | SCLLN | 364782 | VYGTL |
| 218224 | TKQQD | 296266 | DDPGP | 337949 | VMIHD | 364788 | YGCHA |
| 218230 | RLLPP | 296270 | TFHLN | 337969 | LTNLF | 364795 | CSVFL |
| 218249 | SCKIS | 296271 | QVAPA | 337972 | ERSGR | 364801 | IEEVD |
| 218316 | DEMAV | 296273 | LSQNC | 337991 | KLKRR | 364802 | IEEVD |
| 218340 | IQMGI | 296277 | TKLGL | 338004 | RRLPE | 364805 | IEEVD |
| 218343 | SSMQR | 296280 | PQVER | 338010 | GPQAS | 364811 | TTADF |
| 218348 | FMDVN | 296288 | KAKRQ | 338013 | KKKKK | 364813 | LQQKQ |
| 218364 | DDDDI | 296289 | LITKA | 338019 | RCLIL | 364814 | EVFYN |
| 218388 | RSQIA | 296292 | TDKMT | 338030 | RIEYA | 364815 | FQKML |
| 218432 | VEGRK | 296302 | NLENV | 338034 | VPEGL | 364822 | SLKLP |
| 218436 | LSYVL | 296318 | AVAPL | 338050 | GITDD | 364831 | PPAPK |
| 218439 | GFSYK | 296325 | RHNEL | 338062 | ALGNP | 364836 | FISLS |
| 218507 | CNNQY | 296326 | TPGAW | 338067 | GTTSS | 364840 | GLASW |
| 218516 | LKDLL | 296327 | LNLKA | 338072 | KDTSS | 364847 | FFWVE |
| 218548 | KNMYY | 296328 | VQERN | 338087 | KIVSR | 364858 | THKLS |
| 218652 | YFFLL | 296333 | GHFSL | 338089 | EFIDV | 364860 | VQLEA |
| 218721 | VKTMG | 296343 | VLEAT | 338093 | AEEAF | 364863 | WGRRG |
| 218758 | RRARP | 296350 | LPPAL | 338104 | IWAFE | 364864 | GLVPK |
| 218867 | NHICL | 296358 | VYCKI | 338127 | PGARS | 364869 | EETED |
| 219022 | LQKPQ | 296370 | KAGLK | 338141 | FKTVA | 364878 | LFPGN |
| 219054 | KARAQ | 296380 | VKKAK | 338146 | TSCPI | 364883 | RYKGE |
| 219066 | AAQGL | 296387 | GPLGV | 338157 | YLCYV | 364885 | PPPAE |
| 219069 | RTHTG | 296394 | NILFV | 338160 | PEGHV | 364893 | ISHQN |
| 219070 | DWLGC | 296411 | FMSQF | 338161 | VTVHK | 364894 | ATSIL |
| 219084 | SSNED | 296412 | TVVKI | 338164 | TIDVC | 364897 | LGPGQ |
| 219091 | PPAPT | 296414 | SFIFK | 338165 | DHRFS | 364898 | YDVVN |
| 219097 | KATAE | 296417 | QQKTV | 338185 | FDTPL | 364902 | LRDEF |
| 219150 | TVQAK | 296420 | GKTKN | 338186 | WDRLR | 364905 | RKISR |
| 219162 | CSCCP | 296422 | TLEHH | 338191 | MGLLV | 364909 | QFCVR |
| 219168 | HDEVS | 296424 | GGWSL | 338207 | ESQVQ | 364912 | VIASV |
| 219169 | LHNFG | 296425 | HNKQD | 338218 | NREMR | 364915 | IVFIN |
| 219172 | VFPAQ | 296435 | PRTES | 338225 | LFAPY | 364919 | KCVIM |
| 219197 | LVFPL | 296437 | TRSPS | 338228 | VERQT | 364921 | AAGCC |
| 219204 | NNLRH | 296438 | YSLNT | 338235 | ARRET | 364922 | HPLSG |
| 219207 | AGGYA | 296440 | KVTDL | 338258 | DEIRV | 364923 | FFKVQ |
| 219235 | NKLSQ | 296444 | PKAAL | 338260 | SLKAG | 364929 | RAYNR |
| 219240 | ADHRR | 296449 | DDDGF | 338266 | REEKT | 364934 | AKALK |
| 219244 | SLERS | 296452 | FSSFW | 338272 | EIGAF | 364938 | SSAPS |
| 219252 | VLTIN | 296456 | THLGS | 338276 | DTEIK | 364943 | TRPHS |
| 219255 | SGFSL | 296464 | EMEVD | 338288 | CGSKL | 364946 | LVQQF |
| 219271 | LQEWV | 296468 | GRIQE | 338290 | LSNME | 364956 | RDPWC |
| 219281 | SMPLK | 296472 | REEAS | 338293 | MGIRC | 364957 | YCSVL |
| 219299 | YLAGK | 296473 | TPLTY | 338297 | ASNRK | 364964 | YAVVV |
| 219301 | FCSSI | 296474 | PPRPT | 338323 | AFNKI | 364973 | CMRRT |
| 219302 | HWLYE | 296477 | EVTGK | 338340 | KRYAT | 364975 | FLNSV |
| 219313 | KKEKK | 296479 | TTSSL | 338343 | TSVCL | 364976 | KDQQK |
| 219315 | LELTS | 296483 | TLEST | 338345 | YEPEA | 364978 | LWLLH |
| 219320 | VDLLA | 296484 | QRATP | 338348 | KSLGL | 364981 | FTVLC |
| 219334 | GEEEA | 296486 | KRLKT | 338349 | REYYV | 364982 | PPLAS |
| 219343 | ERKTD | 296487 | ESSDH | 338352 | PSSVR | 364986 | KVTTV |
| 219345 | VLLGP | 296490 | PTIDD | 338360 | SAPSP | 364988 | WNLKA |
| 219368 | HLKTQ | 296496 | VYFLP | 338387 | LPKRR | 364994 | GLWSG |
| 219400 | EESEK | 296498 | SVTKL | 338389 | TNLKV | 364995 | VERKQ |
| 219406 | SKEEL | 296499 | LQKVR | 338397 | CSIEA | 365002 | MPWHL |
| 219431 | QDTQA | 296503 | DEDEE | 338403 | SCWQV | 365003 | LLANL |
| 219439 | LSCTA | 296504 | DSGVH | 338405 | LYKGG | 365005 | LERSH |
| 219454 | QKHFQ | 296506 | PCNNQ | 338408 | QGDQT | 365007 | WPELD |
| 219473 | RVDLL | 296508 | VKFSL | 338413 | RYTIR | 365008 | VTKDK |
| 219476 | FTEFV | 296509 | IPVND | 338418 | FEQSW | 365010 | FSLDN |
| 219478 | PGAKA | 296511 | CGEDD | 338437 | ILGKT | 365014 | QNFSV |
| 219481 | FSAKL | 296513 | EQFNM | 338461 | RCFVF | 365016 | TIVKE |
| 219535 | ISQAS | 296518 | ASGID | 338474 | TPWGI | 365019 | LVKTS |
| 219542 | EVALH | 296519 | PNHYL | 338477 | MGGYD | 365021 | GLYTP |
| 219548 | WVEDY | 296522 | QAKTQ | 338481 | EEGED | 365041 | SAAGG |
| 219551 | IPPPP | 296525 | FLQYR | 338487 | LKKAD | 365045 | HRKCF |
| 219593 | TVSNH | 296529 | AFSKI | 338496 | IHTKH | 365046 | VKTIR |
| 219596 | GQGPD | 296543 | LANEI | 338510 | PENKQ | 365048 | ALKLL |
| 219599 | WSSGK | 296545 | FINTS | 338523 | YFLMK | 365051 | GPNQG |
| 219611 | GPRPL | 296557 | WLEEQ | 338524 | STARA | 365057 | MNLEF |
| 219627 | VPEKD | 296564 | SQSSL | 338529 | AYLHQ | 365058 | SYPTV |
| 219638 | KWQYF | 296575 | TSYIV | 338532 | QIEKN | 365063 | NVTII |
| 219660 | ILKAR | 296577 | FFLDD | 338533 | FIKAR | 365074 | VIANN |
| 219689 | SQKPQ | 296581 | QKRRM | 338548 | PVSSD | 365076 | PGKGL |
| 219700 | AWYYM | 296582 | KSVDS | 338556 | KKKKK | 365080 | STNEE |
| 219746 | QVSIF | 296585 | TELSS | 338562 | SVGLN | 365081 | ELSNN |
| 219758 | FWRIM | 296589 | VRYVD | 338572 | PNGLL | 365090 | VIANN |
| 219782 | PQPTC | 296591 | CTEEE | 338573 | DGVGD | 365103 | STKAE |
| 219789 | RAKKK | 296595 | YLTVA | 338579 | YFVIK | 365105 | KKASS |
| 219794 | ESFRI | 296596 | KNKDN | 338606 | PLLLK | 365107 | SGFSL |
| 219797 | KLSKK | 296597 | KSHNQ | 338607 | VTKDQ | 365108 | ETDQR |
| 219833 | CQISC | 296600 | GALCL | 338611 | HLLEA | 365116 | EKMQL |
| 219837 | VKLED | 296603 | IFNDV | 338613 | LTANL | 365118 | VFSSG |
| 219865 | TPLYI | 296604 | SVACS | 338624 | ESPVN | 365130 | TQQES |
| 219891 | LTFYS | 296619 | ADTHL | 338627 | CNVTS | 365131 | FADDP |
| 219919 | LSVIM | 296626 | LQNNI | 338628 | KRKMQ | 365141 | VFSSG |
| 220003 | HELHL | 296632 | LRKAL | 338629 | GDKQL | 365145 | MFFFE |
| 220058 | QQCIE | 296636 | VEDHA | 338641 | TNEAH | 365147 | QSTFK |
| 220062 | GFKIF | 296641 | AYLTK | 338642 | LKILQ | 365151 | LTNGA |
| 220166 | PIPLV | 296642 | VHIST | 338648 | PLNEV | 365152 | MALGV |
| 220188 | AGKHG | 296657 | WKKRT | 338670 | YMVGN | 365154 | EQAPD |
| 220244 | KKKKL | 296658 | LNKYM | 338671 | SPAVA | 365155 | PRHKR |
| 220325 | LPKAD | 296662 | QQSTG | 338673 | KRCKP | 365159 | ESFNI |
| 220420 | VDFAL | 296674 | ERPRS | 338690 | LDCAC | 365167 | SSIAH |
| 220478 | IYSSL | 296677 | VKTSY | 338692 | AQGVV | 365169 | PKINK |
| 220496 | EGPPT | 296679 | LYLAV | 338696 | IQIHS | 365172 | TKDEL |
| 220507 | FFCFV | 296682 | CREDE | 338703 | RILDH | 365173 | KTKGQ |
| 220509 | QLSWL | 296684 | RVSTK | 338706 | GNWGH | 365175 | LPPPR |
| 220514 | SKPEN | 296694 | LSHLV | 338707 | FERTR | 365193 | SRSQL |
| 220531 | PAKRM | 296695 | KSGPC | 338711 | CPPSS | 365198 | EVTNV |
| 220562 | CFKFI | 296702 | RRSTK | 338723 | PQQQG | 365200 | DKKCH |
| 220584 | QTGEH | 296721 | EMKKT | 338727 | LLAQQ | 365220 | DYCVF |
| 220592 | TMYFA | 296734 | KKEDL | 338728 | EQQSS | 365221 | ERETP |
| 220597 | DITRL | 296736 | FLQTK | 338742 | FRSEL | 365227 | ISELP |
| 220616 | KTYSK | 296741 | LFLLA | 338769 | QLLQD | 365243 | KQWKK |
| 220659 | VPNPP | 296754 | ADATG | 338770 | SQVYM | 365247 | GADMW |
| 220669 | ESYLE | 296755 | CKIEL | 338774 | DIKTE | 365252 | TLPFL |
| 220676 | EQEDL | 296775 | WSAVT | 338777 | LSQFV | 365255 | KNYMI |
| 220751 | QNKSM | 296776 | YSLPR | 338783 | WASPD | 365266 | FHLCS |
| 220764 | KTKGS | 296777 | LLKCL | 338785 | PETKI | 365270 | LWSSQ |
| 220772 | QSVFK | 296783 | AVLKR | 338788 | LDLEE | 365272 | SKEKL |
| 220809 | DNMRP | 296785 | QNIKE | 338796 | RENSW | 365280 | RILCR |
| 220812 | KIEKL | 296786 | KKQGQ | 338797 | HSGSL | 365285 | AVMVG |
| 220822 | RPNYF | 296792 | KKIES | 338799 | GYMPQ | 365289 | FHLCS |
| 220849 | DSGFY | 296794 | DCCAS | 338802 | AAGAV | 365290 | GIIAL |
| 220853 | QITQS | 296795 | KNSVH | 338807 | NELDQ | 365294 | RGRPA |
| 220876 | VELSG | 296799 | NIVYL | 338812 | KAEDD | 365295 | GAHRD |
| 220913 | DEADS | 296802 | AVLLV | 338814 | DEWEY | 365297 | VLEHE |
| 220940 | SNILP | 296803 | TSIPL | 338823 | CRRGS | 365298 | HSQDP |
| 220959 | NFGFV | 296805 | RSGLT | 338838 | FYDLL | 365301 | KSKTT |
| 221086 | MQESP | 296824 | AILEK | 338860 | PWPLG | 365302 | LHLCC |
| 221114 | TPVKN | 296839 | ETLLA | 338862 | SGKTK | 365303 | GAFAL |
| 221130 | LVTLR | 296847 | SNEAF | 338885 | PSPQL | 365318 | AEALK |
| 221132 | AVSLE | 296849 | HFHPS | 338886 | LPMNE | 365320 | GQSQP |
| 221138 | PDYFL | 296850 | QRTVL | 338887 | FANGI | 365322 | DQYCC |
| 221166 | VTQSD | 296859 | QVSAV | 338922 | KDIGQ | 365338 | DQCCC |
| 221167 | DLDFE | 296861 | LPDLL | 338927 | LFSPY | 365339 | KQSQC |
| 221169 | AKKKD | 296862 | HEDVL | 338934 | EFEAL | 365342 | KQSQC |
| 221200 | SQSVR | 296869 | YSISM | 338964 | GATIL | 365343 | WGRPA |
| 221204 | IPNVI | 296870 | SLAIF | 338967 | PETLV | 365344 | IEQTR |
| 221232 | DRDLQ | 296871 | EPVQE | 338984 | GGGVL | 365349 | DQYCC |
| 221233 | RYSKS | 296875 | KCTCR | 338988 | ESAVS | 365351 | GSEYP |
| 221249 | SATDA | 296882 | QVLSV | 338990 | DTLAL | 365352 | GAIPG |
| 221265 | DSDSD | 296888 | KSRSR | 339001 | AEEEA | 365353 | DQCCC |
| 221270 | CKAKV | 296921 | VTSLV | 339004 | NPLIH | 365358 | WGRPA |
| 221282 | KPFEV | 296930 | WRKSL | 339007 | VNRNV | 365362 | LGGGA |
| 221283 | DIALP | 296946 | SPPSM | 339013 | KIGII | 365369 | PTPGP |
| 221315 | NGNKP | 296951 | ANFSK | 339016 | HVCLD | 365370 | GQDDS |
| 221327 | LYECN | 296953 | PTSKV | 339027 | FGLFD | 365378 | WRKAI |
| 221347 | SPCYG | 296977 | QHPLT | 339030 | DSAGP | 365382 | KSHLL |
| 221355 | KFILG | 296978 | SETRF | 339046 | HTSRG | 365388 | LTRDK |
| 221363 | KEVDG | 296980 | CVEIP | 339047 | SSFVF | 365390 | EVPYP |
| 221399 | LSSFN | 296989 | RAKGR | 339048 | SKKAE | 365392 | STEGT |
| 221403 | PQDKR | 297001 | ETIDY | 339051 | VKKTF | 365395 | YIKGI |
| 221409 | GITGL | 297012 | KAQSK | 339052 | HHGMP | 365397 | FKGRT |
| 221413 | TMDTS | 297020 | ARKKV | 339057 | VGQQS | 365398 | RCCLL |
| 221418 | TFSKL | 297027 | RRKNR | 339064 | SEENE | 365400 | CEQAV |
| 221419 | AQHAS | 297029 | DSSKW | 339067 | NFWNG | 365401 | RVREA |
| 221421 | GLLFL | 297056 | SVDVA | 339068 | IVSLI | 365402 | VSLTA |
| 221431 | QPAVS | 297071 | SPRRY | 339071 | GPGGS | 365403 | GAEVL |
| 221444 | LVTEV | 297078 | DDRHK | 339075 | EHSAL | 365404 | QRVHT |
| 221448 | EAAPE | 297107 | KFNRN | 339087 | RINPK | 365407 | ITEEP |
| 221452 | GPEAT | 297109 | GKQLE | 339095 | PEFQL | 365411 | RGNVS |
| 221459 | LESRG | 297130 | ESEEL | 339109 | QPMVM | 365413 | ISNTF |
| 221461 | PPPSD | 297135 | MSALQ | 339115 | FNFGE | 365414 | QVSSL |
| 221462 | GQETL | 297142 | AVFHN | 339122 | IRWKN | 365415 | GARTW |
| 221466 | IPATA | 297145 | ILLLS | 339128 | SHSLG | 365416 | SSSTL |
| 221476 | IPAQK | 297146 | PYCVI | 339131 | LNRCV | 365418 | SWFSD |
| 221480 | EATTP | 297150 | QQKSL | 339135 | NRVSI | 365421 | FDQVT |
| 221482 | GVKPR | 297151 | SFLGQ | 339136 | GCSVA | 365423 | PPKPM |
| 221485 | PVRDY | 297156 | GSEVP | 339145 | AMDFF | 365431 | AGIQT |
| 221486 | SATSL | 297157 | GSDSE | 339147 | SHRLG | 365435 | GMKPS |
| 221494 | PPPTN | 297158 | VMPLW | 339151 | LEQAS | 365439 | DVEGF |
| 221496 | ECGCR | 297161 | LCPQR | 339153 | RSKLQ | 365441 | CVHAL |
| 221498 | PSRQL | 297163 | EHAQT | 339157 | HIFFK | 365443 | EATSQ |
| 221515 | CRVQP | 297164 | GAGSM | 339161 | TLHKE | 365448 | EAHRF |
| 221538 | EETDD | 297183 | GRDTR | 339168 | DKENM | 365451 | VICRE |
| 221543 | EGADS | 297185 | KEEKQ | 339174 | CCACV | 365460 | VKVLK |
| 221554 | DSESE | 297186 | KKKKK | 339175 | NLDLQ | 365463 | LVELE |
| 221561 | GEKSD | 297195 | ILAGL | 339179 | LQITT | 365465 | LLNSP |
| 221566 | DDQQE | 297203 | APSRF | 339182 | NEEQL | 365466 | LSSLI |
| 221567 | SYMPS | 297205 | ICSQL | 339184 | APSQD | 365469 | QSLGR |
| 221573 | ATPAR | 297235 | KSRGM | 339186 | APMTR | 365473 | RNSGP |
| 221576 | SKTPS | 297239 | TLVLH | 339191 | LQKEI | 365476 | IPSPR |
| 221671 | VNKEL | 297258 | YEKVE | 339196 | RRRLS | 365477 | KAKAS |
| 221730 | QDLLD | 297261 | AVKSS | 339207 | DLSPK | 365486 | RWWPF |
| 221735 | TGEMQ | 297265 | AAWAT | 339208 | ALKVI | 365488 | QHIKN |
| 221740 | RLYLQ | 297267 | IPGKW | 339216 | GDKNL | 365491 | STSAV |
| 221742 | NESAM | 297273 | DKSKH | 339238 | PLKCY | 365492 | NITNR |
| 221770 | GTIDL | 297283 | QGKAK | 339245 | GRYRR | 365494 | NCIVA |
| 221784 | EDDDY | 297289 | REEKY | 339250 | KPLQP | 365498 | LVHTF |
| 221797 | VCVCN | 297290 | GATFA | 339251 | TPDAQ | 365503 | NEVTV |
| 221801 | PKVKN | 297293 | DGEKD | 339255 | YEIHC | 365505 | ADGPV |
| 221804 | SYLKR | 297307 | GRVEE | 339256 | TTRFT | 365514 | NEWYV |
| 221818 | FQGRE | 297313 | KSIEA | 339260 | LESHC | 365522 | RCIYY |
| 221847 | MSLGK | 297316 | NYPDV | 339276 | QFYPL | 365528 | HKLEV |
| 221852 | VTQTP | 297323 | AGKEA | 339280 | QKSEL | 365529 | DSFKV |
| 221855 | GLDEI | 297324 | VNDNV | 339292 | LNDYV | 365530 | PNQKS |
| 221856 | NTSLT | 297325 | PGKHI | 339299 | LLPRV | 365534 | QNQFI |
| 221859 | HRWTE | 297338 | RFHII | 339307 | GLMKN | 365543 | DDDDF |
| 221891 | LEERP | 297345 | EDPCD | 339314 | SGEKL | 365550 | SDQCR |
| 221899 | DRMFF | 297347 | LAMRN | 339324 | RLKKD | 365554 | MEHLK |
| 221922 | PFESV | 297350 | KISCL | 339328 | TLLWT | 365562 | QPSWG |
| 221930 | SCKCS | 297354 | SFIFI | 339340 | LIRYR | 365567 | VVKVD |
| 221943 | SPVPA | 297375 | KSDSE | 339344 | RFTCG | 365569 | PLRTA |
| 221954 | ADVVS | 297404 | DDFWF | 339353 | VTAHF | 365570 | QEAGS |
| 221957 | PEEKK | 297405 | VCTMV | 339355 | LTPFF | 365576 | GSQPS |
| 221972 | QLEKP | 297416 | IRTLP | 339356 | AKGTQ | 365577 | GGCFY |
| 221973 | LSTPR | 297423 | ASAEH | 339366 | LQCIP | 365581 | AQKDL |
| 221975 | ANKKH | 297431 | LYDFL | 339377 | HCLHM | 365582 | TGAGK |
| 221978 | GYETL | 297435 | CTRVD | 339381 | HATFV | 365583 | AQKDL |
| 221980 | QLTSA | 297436 | RFCCL | 339382 | LAQQR | 365589 | MYGNE |
| 221992 | GVALI | 297438 | GDGIA | 339384 | NYLKG | 365596 | SSNGK |
| 221996 | KFQIL | 297439 | AKCCK | 339388 | NTTII | 365601 | TLKMK |
| 222002 | LFPWE | 297440 | VPATQ | 339389 | LPRLL | 365604 | FHPCL |
| 222005 | KDVSV | 297445 | GEPVK | 339398 | HQGPL | 365625 | REELG |
| 222008 | QMEPV | 297450 | RPLDF | 339399 | MILLL | 365630 | NCCNG |
| 222032 | LKIRE | 297459 | LAVQS | 339404 | LPGKS | 365637 | AKETS |
| 222033 | EAPGQ | 297468 | QQVLA | 339423 | KRKTR | 365641 | CGTPL |
| 222107 | IKTSK | 297477 | QWSPG | 339428 | YKFQV | 365642 | DITCP |
| 222115 | YRVQV | 297494 | DTNSP | 339432 | RWKFC | 365644 | AKGCL |
| 222120 | SSCSC | 297504 | HQHKS | 339435 | QSVSV | 365656 | LCSKP |
| 222122 | QHGAL | 297508 | SSPSQ | 339450 | PWLNS | 365662 | FITRA |
| 222124 | EIRSL | 297512 | LGAPP | 339458 | ANIMP | 365678 | QNACS |
| 222139 | YVACS | 297518 | DFCPP | 339461 | GKYVD | 365679 | DLRIR |
| 222145 | VATSP | 297524 | DVSEE | 339467 | SCILL | 365683 | SLSVK |
| 222157 | PSYAS | 297532 | GPEGG | 339469 | ELKCR | 365684 | AETVD |
| 222190 | MTPPW | 297533 | AMYRP | 339479 | EEEEE | 365686 | SQKQM |
| 222212 | STSPC | 297534 | WMLHS | 339484 | KLPKI | 365687 | FEFVS |
| 222214 | FTASK | 297537 | QGARP | 339493 | HLASE | 365692 | WSLLP |
| 222219 | RAYKI | 297540 | DLDIF | 339495 | APAPL | 365694 | GPPLP |
| 222224 | PHLTH | 297542 | GIKFQ | 339498 | WECHH | 365710 | YEVIY |
| 222246 | PNKTC | 297562 | ILVPL | 339499 | GSAQS | 365711 | LYRFI |
| 222247 | PNTFF | 297564 | FQSVK | 339503 | EVDTV | 365714 | RRRPH |
| 222248 | QETNL | 297565 | PRQDF | 339511 | SRKND | 365718 | CQYKI |
| 222249 | PSDCG | 297574 | KNCVN | 339522 | PKSSS | 365725 | WSELV |
| 222250 | RCMTC | 297578 | REKRK | 339527 | SWVPG | 365729 | SRPRE |
| 222254 | PPAAR | 297579 | VAVVK | 339529 | IAIEV | 365734 | KLGYF |
| 222256 | QDCAC | 297581 | SADKS | 339532 | WQCKE | 365744 | NGPPL |
| 222266 | PLGTP | 297591 | RSFTR | 339557 | KSASS | 365745 | VPECP |
| 222270 | RRFLN | 297592 | EYNSL | 339561 | QTCCF | 365757 | GHILT |
| 222271 | QLRQA | 297596 | DLSVL | 339564 | KEVLD | 365760 | QEWVS |
| 222284 | VNVHS | 297613 | RDTRS | 339565 | CMEDK | 365762 | ETRWS |
| 222286 | FSRDK | 297623 | PISEP | 339566 | APKKK | 365764 | PQLGH |
| 222301 | FFLFF | 297625 | FTWAS | 339577 | CRIQQ | 365766 | YQQYH |
| 222304 | MCCKT | 297632 | LETKS | 339578 | LLARK | 365767 | ETEAP |
| 222305 | EGTRQ | 297661 | RAGAS | 339580 | WASNS | 365769 | AKGLA |
| 222307 | EMTGE | 297668 | KKEEC | 339585 | FRGLI | 365771 | ESLVY |
| 222308 | IAARN | 297679 | TGSAQ | 339587 | GREHS | 365772 | DLGRS |
| 222329 | EHRDS | 297689 | ASDSG | 339605 | INLLG | 365773 | EMHQL |
| 222330 | LTNSS | 297737 | NLKNK | 339613 | WKITY | 365776 | TKPAL |
| 222339 | VQISG | 297761 | NPCCP | 339621 | GFLSQ | 365778 | AGNRT |
| 222345 | EKKEL | 297767 | TAKDK | 339624 | FSRHG | 365788 | QPLNN |
| 222374 | EEFFI | 297770 | LKKCP | 339626 | PSKGL | 365793 | QCLPL |
| 222379 | SRLLA | 297777 | VYSGL | 339627 | LGSYY | 365794 | CPLSD |
| 222381 | LYCEL | 297784 | AAGRQ | 339637 | EADCY | 365799 | PSILP |
| 222382 | ITSGP | 297785 | SQKNS | 339642 | LKIHT | 365800 | VSPGA |
| 222388 | SLPRP | 297788 | AETSS | 339659 | YRYLQ | 365802 | PVLVA |
| 222390 | KVPQS | 297801 | DGSRL | 339672 | RTHTV | 365805 | EEGCR |
| 222396 | PGSSR | 297814 | RDLKT | 339680 | KTSHP | 365806 | GEDEC |
| 222402 | QKYAM | 297819 | KFSKF | 339681 | VIPPK | 365807 | EFNLV |
| 222462 | VHTCK | 297820 | YNMKC | 339704 | EDILY | 365812 | ASKRQ |
| 222481 | RDHPY | 297830 | FMLTH | 339712 | LLKDS | 365815 | ESHSL |
| 222482 | RDNLY | 297848 | WGPGV | 339720 | ERPDF | 365827 | GSSNQ |
| 222511 | KMDII | 297857 | SKSDD | 339722 | LASAV | 365830 | SNVFG |
| 222543 | RKKQF | 297866 | IVTYI | 339723 | VTQRE | 365834 | PSPSL |
| 222553 | EAAHH | 297873 | PRLRK | 339726 | YFLQK | 365836 | GSSNQ |
| 222567 | KSNFL | 297875 | GKCRL | 339729 | SLWEY | 365837 | DGDTD |
| 222572 | LYCEL | 297894 | LWGVG | 339730 | DRFDN | 365838 | QSRER |
| 222573 | FRCNF | 297904 | SRKNP | 339731 | RPAVR | 365839 | PHAAS |
| 222574 | GSQQH | 297905 | LASAV | 339732 | LGPLR | 365840 | KSPAS |
| 222584 | NMEEF | 297908 | KELLG | 339737 | AISGC | 365841 | PTDWE |
| 222597 | RPYYQ | 297913 | TFFFR | 339740 | LWQNI | 365851 | ATSSG |
| 222598 | SGTLY | 297926 | RKDYV | 339743 | GGTVA | 365856 | RSLWY |
| 222607 | SFLQL | 297954 | DPVRS | 339750 | PREDL | 365857 | AHKGS |
| 222644 | ISWVY | 297977 | VSESL | 339754 | RSCEV | 365858 | APLSS |
| 222673 | FKNFS | 297988 | ALEHF | 339764 | MTSHN | 365861 | PQTAC |
| 222674 | LKQEK | 297990 | ERWTV | 339767 | CIDTP | 365864 | SPHHL |
| 222693 | QLSQD | 297991 | HKEQI | 339769 | PRLGS | 365865 | KGKWN |
| 222718 | QHLNY | 297994 | RNSVE | 339775 | KKKKM | 365866 | TCVVQ |
| 222725 | RTAIF | 298047 | HQTQV | 339787 | MYGGK | 365869 | SSEMT |
| 222726 | GAFRP | 298048 | SSCKV | 339793 | ILGPL | 365877 | RKYLF |
| 222728 | AKAGE | 298050 | QNRHI | 339800 | ANARL | 365883 | LNKGL |
| 222747 | EMEEL | 298068 | GFGLE | 339801 | QLLMP | 365884 | LTLKG |
| 222753 | LKTTS | 298085 | YVHSV | 339802 | QLVNF | 365889 | ATPAW |
| 222761 | VPLTR | 298097 | FSEDI | 339804 | LLKQQ | 365891 | DEWDD |
| 222792 | EDVLF | 298105 | NRRSV | 339813 | HLGSS | 365892 | FSLSS |
| 222800 | RGFLV | 298110 | SATFP | 339820 | FRGIQ | 365895 | QVVRW |
| 222803 | KHDEL | 298119 | RLELI | 339822 | RAGMA | 365898 | VLVHS |
| 222812 | GGIFA | 298124 | RLTSS | 339823 | VLCIM | 365899 | KVGAT |
| 222823 | RIICF | 298125 | TPVVS | 339826 | PPRGR | 365903 | LQRGK |
| 222902 | NQTTC | 298129 | MTSHS | 339830 | CKTVI | 365906 | RRIHR |
| 222956 | SGRRF | 298130 | FEIVQ | 339834 | RKQKI | 365910 | LKEKP |
| 222968 | LSLNK | 298139 | GGLFS | 339835 | RGERA | 365912 | AHNSI |
| 222969 | RGCSG | 298159 | EGKPL | 339836 | WKAEL | 365914 | PPQKL |
| 222982 | TLSGE | 298165 | KLHST | 339838 | LAQKN | 365918 | EVPSS |
| 222990 | GLCPH | 298171 | MQTVL | 339845 | EDIKK | 365920 | ETLKH |
| 223023 | DEWED | 298173 | GDAEW | 339850 | ITSLS | 365929 | EHPLL |
| 223026 | RSIQL | 298181 | EEDDE | 339851 | FPPGF | 365931 | VTKNL |
| 223029 | LKLLK | 298189 | QHCSQ | 339861 | QHASL | 365934 | YCSGN |
| 223051 | IDNNF | 298198 | IWRSV | 339867 | DELIL | 365935 | SKGAW |
| 223054 | VFLRT | 298215 | VASNV | 339869 | KQCIS | 365944 | VVQIF |
| 223061 | AASQD | 298223 | LWLLG | 339881 | ETVQP | 365945 | YSYYQ |
| 223073 | KWFDS | 298229 | LQLSK | 339889 | LENLE | 365946 | DNYDN |
| 223076 | AEQQA | 298231 | KTNLF | 339911 | SQLLS | 365959 | PSAEP |
| 223084 | EGPEV | 298248 | QVQPQ | 339912 | DHSHS | 365962 | ATAAS |
| 223095 | QVMEP | 298251 | VEISA | 339915 | VCFMG | 365963 | GPMQH |
| 223114 | CLTFI | 298281 | TVESV | 339916 | TPQKK | 365967 | LIKST |
| 223122 | KLGNP | 298282 | SDSLE | 339917 | DNDIM | 365970 | PSTSD |
| 223127 | SFVDP | 298283 | RVLHS | 339918 | QNGGW | 365988 | TRRFL |
| 223129 | IVQHD | 298288 | SDMLK | 339928 | RAERE | 365991 | KFHFN |
| 223136 | SKSKS | 298292 | LYDLD | 339952 | KSADL | 365993 | LLWMT |
| 223140 | SWGTR | 298295 | VIHEL | 339958 | VELTG | 365996 | TREPL |
| 223145 | NYVII | 298296 | NFCPE | 339959 | GKEHS | 366001 | TACKV |
| 223167 | GEEKD | 298298 | PCSVI | 339960 | ARGSV | 366006 | SLPKI |
| 223208 | GKPWK | 298299 | VAGLR | 339971 | GRSSA | 366007 | LQVTA |
| 223210 | APGMS | 298307 | NTSGS | 339973 | GVATS | 366008 | HLPCH |
| 223214 | NPKRV | 298310 | NVKRK | 339992 | RTLVM | 366015 | EDFKP |
| 223215 | FINSF | 298315 | VHTPH | 340009 | QGKPF | 366022 | NNANV |
| 223271 | ALPRS | 298316 | SNYKS | 340010 | DYLFS | 366024 | KKSSD |
| 223273 | HLKQL | 298317 | CLGAQ | 340017 | ALSSA | 366030 | VRKPQ |
| 223274 | LKTEL | 298350 | IHMGD | 340019 | GGGMF | 366031 | VLRCH |
| 223293 | KTPRL | 298351 | QNQYH | 340059 | VESPD | 366032 | RATQL |
| 223321 | LAAIA | 298352 | GWDGE | 340083 | SILGF | 366035 | NQENE |
| 223324 | WFTQN | 298375 | FHIEY | 340086 | STYGL | 366036 | KLSNL |
| 223336 | EVKKE | 298386 | MKPVS | 340087 | ILYAS | 366038 | ALDWW |
| 223357 | NFGDF | 298396 | EEDDE | 340088 | PRPGL | 366042 | CCCCF |
| 223361 | LGLGP | 298406 | KLWLR | 340089 | VATIS | 366043 | NFLYF |
| 223364 | DEKEE | 298440 | YSNNP | 340093 | DDENF | 366050 | VDMES |
| 223366 | CMLGQ | 298466 | AGPPA | 340095 | TLKSK | 366054 | RGLGL |
| 223368 | TASES | 298468 | DQNKG | 340100 | TEEEG | 366058 | KNNHL |
| 223369 | CCAIM | 298472 | ESESD | 340125 | DKIAI | 366061 | AQIQW |
| 223398 | QEDKH | 298492 | QTSQI | 340132 | IHTNK | 366062 | SEALP |
| 223428 | EGNPY | 298510 | QKVNQ | 340148 | KKKRK | 366073 | RMSGH |
| 223500 | QIPAS | 298527 | VDQLP | 340162 | FVISP | 366080 | ILKHK |
| 223528 | VIQLY | 298532 | RRRLV | 340166 | KKVEK | 366081 | EEDDE |
| 223608 | PSSCA | 298542 | NYFLA | 340176 | RELPC | 366083 | EEDDE |
| 223641 | KYTRS | 298545 | PKKIP | 340177 | GRGQA | 366084 | FETAL |
| 223642 | FLNGC | 298552 | HHEHS | 340191 | ELQAM | 366089 | PPLCL |
| 223795 | YSNSD | 298556 | AKYKA | 340200 | NCVPL | 366098 | FHLVR |
| 223836 | LDALK | 298557 | VHTAP | 340206 | NFKNS | 366107 | EEDDE |
| 223862 | LAKYC | 298569 | TPTGF | 340210 | WSLHP | 366112 | FQNQN |
| 223864 | FFIDK | 298585 | LEPER | 340211 | ENGDA | 366113 | ILFSP |
| 224024 | DRYSG | 298596 | PVINV | 340212 | SGLWW | 366116 | SLKFS |
| 224073 | GPRAK | 298622 | ELVEK | 340220 | FRPIR | 366118 | EEDDE |
| 224112 | FALAE | 298630 | SAGSG | 340228 | CLHVF | 366119 | VPPSL |
| 224140 | KRKLL | 298635 | RVERV | 340236 | CGKAF | 366121 | IFPPH |
| 224167 | CMTEQ | 298642 | KAMPS | 340237 | DDFVI | 366124 | TCQDA |
| 224181 | DEVRR | 298681 | IALWA | 340247 | AYRVA | 366134 | GKVET |
| 224237 | HDDLE | 298687 | MEVSC | 340261 | LALRR | 366135 | NWPQR |
| 224337 | AVKVS | 298690 | LDRVL | 340271 | KHRAH | 366140 | EDKQQ |
| 224356 | FHGEI | 298694 | PTTPL | 340274 | TCVVQ | 366144 | YAAAL |
| 224600 | LQDHL | 298699 | RNGSK | 340278 | LVLKD | 366146 | GLTQS |
| 224605 | TCACR | 298700 | LYFSQ | 340279 | KDDLP | 366155 | KIQRI |
| 224652 | LLFRN | 298705 | TSCPK | 340281 | EEEAD | 366156 | LNDVS |
| 224721 | EITEL | 298708 | GVSPC | 340292 | GDEEI | 366157 | SRPHF |
| 224756 | YRGPQ | 298717 | KPKNL | 340296 | LGQRL | 366169 | PAHPQ |
| 224764 | QDVKI | 298728 | AADPL | 340298 | ASPFC | 366170 | RDKGK |
| 224784 | HRKCF | 298738 | SKLWF | 340299 | RPPFS | 366171 | SEGFP |
| 224807 | YNKGL | 298743 | LGPLF | 340306 | GSTPN | 366173 | TAAAR |
| 224950 | YYTAF | 298746 | VIKTC | 340310 | YRKAR | 366174 | PKASF |
| 225171 | RNYEI | 298771 | SLYPC | 340312 | NSLAE | 366175 | PKASF |
| 225174 | CGQLS | 298777 | DFLNY | 340314 | DHSSL | 366178 | LEGFH |
| 225235 | PALKS | 298786 | ANARL | 340328 | GLQMD | 366179 | KQAKS |
| 225245 | LELSA | 298818 | FSIKL | 340329 | TQQVN | 366184 | GPQKP |
| 225276 | QLYQR | 298820 | TCQWN | 340330 | KRGKW | 366186 | SGGHS |
| 225296 | RTARN | 298832 | AHTKI | 340361 | KESSI | 366190 | EDYDS |
| 225298 | HYSDF | 298834 | EPRNR | 340363 | EWLLK | 366191 | LLVVD |
| 225371 | AWRGT | 298838 | ECVGA | 340369 | GTSDN | 366197 | HLLYK |
| 225387 | RRIQQ | 298841 | DPTKP | 340372 | PSLRH | 366201 | KEKGK |
| 225388 | DSPDQ | 298852 | LQYYA | 340381 | RVSPS | 366205 | AKYVL |
| 225396 | YITKG | 298854 | KPGFV | 340392 | QPSPG | 366207 | ERPSR |
| 225402 | EGHGD | 298875 | QYAIV | 340396 | PCVLL | 366208 | SCSSD |
| 225410 | QNEES | 298876 | ALLPS | 340401 | KRTQA | 366209 | RSWEH |
| 225426 | KARMD | 298877 | CREDD | 340402 | WETAL | 366221 | AASSP |
| 225428 | NFMKR | 298894 | EGNFT | 340409 | RPLFC | 366223 | SLCNF |
| 225430 | EETKK | 298901 | SPPSS | 340427 | DLFVF | 366225 | DGDLK |
| 225441 | SSEPN | 298902 | IARFY | 340429 | DTHCP | 366227 | YTEEA |
| 225474 | HLAQP | 298910 | RTSVE | 340434 | RARNL | 366228 | KLRLP |
| 225504 | TAIKT | 298912 | DVSRL | 340436 | TAAAA | 366230 | ELLTS |
| 225512 | VHTCK | 298919 | SVTTV | 340445 | AVKAF | 366231 | QPEDF |
| 225519 | NQKES | 298923 | LGTQC | 340450 | TTTNV | 366234 | QQATT |
| 225525 | QSMLS | 298925 | CLQNN | 340453 | SLKQM | 366237 | RQDPT |
| 225538 | NMRTS | 298942 | WLTFK | 340454 | LTVES | 366240 | HKEGK |
| 225550 | ASMGR | 298943 | IIYAD | 340463 | PVRGH | 366243 | ASKAH |
| 225567 | SAGSS | 298953 | LGSPG | 340465 | ILPYV | 366246 | QRLCR |
| 225573 | ERLAP | 298966 | PTITE | 340466 | SIHLR | 366249 | YCIGG |
| 225576 | ASGMH | 298974 | EQEGV | 340467 | EPGTD | 366258 | AQEKS |
| 225577 | LRMNL | 298992 | ITSRV | 340474 | EGPRS | 366264 | EATED |
| 225583 | VGTAP | 299001 | HLFYL | 340476 | FHLLG | 366267 | LPGIW |
| 225587 | TGKKP | 299022 | KRKIR | 340477 | LLDIC | 366271 | LQKLS |
| 225603 | KDDKN | 299045 | SPPTN | 340488 | INIII | 366273 | KKASH |
| 225609 | SLSFL | 299084 | HKAAG | 340494 | QRFLD | 366274 | GSCML |
| 225648 | EKQAE | 299088 | VEKDE | 340505 | TLAKK | 366275 | HENAI |
| 225655 | RRSQY | 299092 | PKVDS | 340507 | RQLLK | 366278 | PETPL |
| 225665 | LFLSG | 299106 | SSFVI | 340510 | VSGQK | 366280 | RKRFY |
| 225688 | RCVIS | 299125 | KKMRA | 340514 | MGEKV | 366283 | TFSQF |
| 225696 | NHVNF | 299134 | SGSQE | 340524 | KTIQV | 366284 | SFSCQ |
| 225698 | FVKSQ | 299136 | DKPTL | 340526 | WKYCV | 366288 | HSLSD |
| 225719 | YSSKH | 299138 | EGLIL | 340546 | ASSCC | 366291 | LGLQA |
| 225724 | LYAFH | 299140 | SSSDC | 340560 | TQLIF | 366293 | PRVLQ |
| 225726 | KVKAM | 299155 | AEAEA | 340563 | FSAHC | 366299 | RLLGG |
| 225728 | NTSGK | 299157 | IGGDF | 340568 | QFRRN | 366300 | TDEDD |
| 225729 | QIVKK | 299162 | PIALL | 340572 | MVSIS | 366306 | FEKPT |
| 225737 | KSTKL | 299163 | KGRYN | 340578 | TETTV | 366307 | TPQRL |
| 225760 | QAFRP | 299164 | VLRPC | 340584 | LKNKK | 366317 | FDRRD |
| 225768 | TPDAL | 299166 | VHYEI | 340587 | LKQSP | 366322 | KMTFL |
| 225777 | PPPVY | 299174 | SRPQK | 340590 | NTAHQ | 366325 | GFFVG |
| 225792 | TGYSQ | 299178 | IPVST | 340594 | LNMSF | 366328 | FLPCS |
| 225805 | LDQSF | 299191 | PSMAL | 340595 | PYVWD | 366330 | LANAL |
| 225823 | EEIAC | 299192 | KRLTS | 340596 | GFELS | 366331 | VDVET |
| 225831 | QTPKT | 299194 | ISSVA | 340608 | DILDC | 366336 | SWRAA |
| 225842 | PSKRK | 299198 | MPAQK | 340609 | DGREL | 366339 | HHLNQ |
| 225844 | HTLKT | 299201 | LWPPG | 340625 | CKLDF | 366342 | PFSLL |
| 225873 | YSPEN | 299206 | AERDW | 340627 | DLNEM | 366343 | VPMEI |
| 225893 | PLQAW | 299213 | SRACV | 340636 | GLKRR | 366345 | VIRRL |
| 225899 | PQGRY | 299218 | SMDTS | 340637 | LVTIH | 366346 | FPPPP |
| 225916 | GLIDK | 299229 | RGRLY | 340644 | KLKRK | 366347 | QQWTW |
| 225927 | VAGSW | 299233 | NGTRL | 340652 | GSALF | 366352 | TETLD |
| 225928 | FRLLH | 299234 | PLHAA | 340657 | KKHLG | 366355 | SKLTY |
| 225929 | PAAPQ | 299237 | AACLP | 340658 | MSLDS | 366363 | QVNTW |
| 225941 | VEPSC | 299238 | PPRDL | 340660 | TWVYC | 366365 | AMFKL |
| 225964 | PVCFL | 299259 | VSKLA | 340661 | EECIR | 366369 | LNPSH |
| 225972 | TDSQQ | 299272 | NHHDC | 340662 | SGWVM | 366372 | WEWGK |
| 225973 | SCNLM | 299290 | PRAES | 340667 | SDSAL | 366373 | MEVDV |
| 225992 | SPLDL | 299293 | TDLPM | 340668 | ALAEA | 366374 | LMGWE |
| 225995 | VSWVY | 299295 | SGMEV | 340671 | NLHQA | 366375 | FISMK |
| 226004 | GKLKP | 299297 | SPKPH | 340672 | PKSQE | 366378 | FFCKK |
| 226021 | AEPEH | 299299 | AVSMT | 340677 | PGRKP | 366380 | RNCKS |
| 226067 | RHGPL | 299300 | DHHPC | 340683 | WKDTL | 366381 | MEVDV |
| 226091 | IYYKV | 299308 | LQDQM | 340684 | LLPRS | 366383 | PNVLV |
| 226094 | ANLTS | 299314 | NRIRV | 340685 | DKLGQ | 366384 | ILTSA |
| 226102 | FSLFV | 299320 | PLEQL | 340688 | LVTSL | 366385 | CKEQV |
| 226105 | IFGPQ | 299322 | AFQTV | 340691 | FEMDI | 366387 | NEIEY |
| 226193 | KMKNA | 299326 | FVPVA | 340692 | YGYTI | 366390 | ARPGH |
| 226207 | IISEE | 299328 | LQPGR | 340693 | DALES | 366391 | FLAQK |
| 226209 | HESEE | 299333 | VPVEE | 340698 | KVGRY | 366392 | IEFVN |
| 226218 | APGHL | 299335 | VPGYN | 340703 | PPKSK | 366395 | SPVAH |
| 226225 | STHRD | 299338 | EEEEY | 340736 | DTYLQ | 366396 | RYNWN |
| 226230 | KRKKK | 299339 | KNAYV | 340737 | KKLKK | 366402 | PIVPI |
| 226247 | PVALA | 299340 | GNARK | 340742 | RKMDL | 366404 | METSP |
| 226253 | ANHAY | 299345 | SDKET | 340748 | MLKRT | 366405 | VTLSQ |
| 226258 | WPSIN | 299350 | YRRCA | 340752 | LNLSI | 366410 | AEAKT |
| 226272 | SKTGI | 299351 | FIYMA | 340770 | TRRIY | 366412 | SGVQT |
| 226279 | CTSEI | 299353 | NHLLK | 340776 | PTDLP | 366413 | FSATY |
| 226284 | YYHHQ | 299367 | NFLPL | 340784 | KTASA | 366415 | ILIYY |
| 226299 | SQDNA | 299370 | DLGFL | 340787 | ILGPL | 366416 | KYSSS |
| 226317 | GNKKN | 299373 | SAFHS | 340795 | TFGIP | 366418 | EKTKK |
| 226319 | SILAS | 299377 | RSLFA | 340796 | QPEEN | 366419 | RLVRD |
| 226355 | PKIGN | 299381 | TPSSG | 340797 | YRYLQ | 366425 | RRRKF |
| 226359 | AALGV | 299413 | EEEDT | 340799 | VAPSN | 366438 | QEWLV |
| 226382 | KSSMF | 299415 | KSQAD | 340807 | KRKKK | 366445 | HQPPK |
| 226413 | GYFSL | 299421 | KMQDK | 340811 | KKTIL | 366447 | THYPP |
| 226432 | PKYFL | 299424 | PHYFT | 340820 | AKQGL | 366453 | RDTEL |
| 226440 | YQSRE | 299427 | TLLNP | 340823 | EEKSD | 366460 | VSEQC |
| 226444 | FRTEI | 299432 | VDGGI | 340826 | KKKGK | 366461 | TLSGM |
| 226460 | PTPAP | 299440 | DSMEF | 340836 | DEDSD | 366463 | VSCLL |
| 226522 | VVEVS | 299441 | TELHI | 340838 | PPLQP | 366467 | QSMNT |
| 226524 | EHLES | 299443 | TKTNI | 340841 | SSHSS | 366475 | DSAQD |
| 226574 | LEGKI | 299459 | TRNFP | 340842 | AAQGS | 366476 | KRTGW |
| 226578 | LTDIY | 299466 | EIGIN | 340858 | WDRDM | 366477 | PFQVW |
| 226725 | IDKPL | 299481 | WWWCF | 340871 | LKKEK | 366479 | NWDMS |
| 226730 | ISTLT | 299492 | VGQIS | 340874 | EGWAT | 366480 | HQENS |
| 226760 | FLSAA | 299498 | MIFTY | 340879 | PESES | 366482 | SGKDA |
| 226798 | DRYCK | 299502 | RFSSP | 340883 | TAPAW | 366485 | QPMVM |
| 226840 | IKESL | 299505 | YLPQY | 340887 | SNYTR | 366487 | RIGVR |
| 226951 | HLLPL | 299512 | VRIYS | 340896 | PPWEP | 366488 | EFSEF |
| 227135 | KEENK | 299518 | VKDLD | 340913 | EETNR | 366490 | IKQIG |
| 227155 | KVPKY | 299529 | IYVRE | 340914 | KENSE | 366491 | VCVCI |
| 227157 | KELQF | 299540 | AGTTG | 340925 | EEEEG | 366492 | ELSSK |
| 227251 | AAPKK | 299543 | LNDLM | 340935 | CQDGY | 366499 | HCAKQ |
| 227256 | EITVS | 299550 | SISQV | 340937 | IAVKP | 366506 | TCQEL |
| 227266 | PIPKL | 299563 | MAGAK | 340943 | QTAAV | 366509 | KTLSQ |
| 227322 | LAPQR | 299565 | GNANK | 340964 | TKSDG | 366511 | PHHGV |
| 227348 | PESIV | 299575 | TVSNF | 340967 | ESDEL | 366513 | STLSY |
| 227349 | VLHIV | 299578 | THRIL | 340969 | EKGKE | 366515 | LQYFV |
| 227378 | IEEVD | 299596 | KQKFE | 340972 | YYSHA | 366519 | KCKST |
| 227451 | AQEKD | 299598 | ALPKD | 340975 | SFQDR | 366520 | TLIRH |
| 227471 | GPEEQ | 299601 | EEDDD | 340982 | EDRGW | 366522 | MEGVL |
| 227474 | IKSII | 299604 | LLQEE | 340983 | VIPGH | 366527 | ANKLY |
| 227507 | RDVDI | 299608 | EKKKD | 340989 | QEPQS | 366528 | RGQEC |
| 227520 | PAAKI | 299612 | DLQDP | 340995 | WSKSD | 366534 | SWCSL |
| 227524 | KFYSL | 299613 | SLTIY | 340998 | KRECK | 366537 | PNIKK |
| 227525 | SVEEE | 299626 | KTKKQ | 341006 | HKSSH | 366539 | PRLQE |
| 227618 | DQWMI | 299633 | TSEGT | 341013 | ANGIQ | 366544 | DESES |
| 227638 | LDSSC | 299641 | HSSLG | 341021 | RRVKR | 366549 | IDREF |
| 227665 | HLGDP | 299642 | FTIPQ | 341030 | NPISV | 366550 | KPRLY |
| 227666 | APLES | 299663 | KGKSL | 341031 | GSIGF | 366551 | LEGLL |
| 227752 | LQSSE | 299665 | GTTLN | 341032 | VFTCK | 366553 | RRPPH |
| 227756 | RSLAS | 299667 | IREST | 341043 | PSPPA | 366565 | HVGVR |
| 227758 | RTFLS | 299671 | ATQKS | 341044 | SPAST | 366578 | TGNAL |
| 227868 | PIRLA | 299687 | ELQEA | 341045 | KKKRD | 366579 | LDCFV |
| 227880 | SRDRG | 299694 | PERIV | 341051 | WGPGS | 366581 | YGFGG |
| 227918 | LCDLF | 299697 | RKHCP | 341058 | KELSL | 366582 | CFWWI |
| 228027 | VLEVN | 299705 | RAVHS | 341061 | GGTVA | 366586 | QNIKI |
| 228136 | KSSGS | 299709 | VWEMF | 341071 | GESNV | 366592 | FLVVL |
| 228140 | SALVA | 299714 | LKRES | 341082 | VVQYH | 366595 | QEHMQ |
| 228217 | SVEGF | 299721 | KCSVM | 341083 | PPGLL | 366603 | LDQKS |
| 228226 | TIAEN | 299727 | NCTHV | 341085 | DDWSN | 366604 | FRAHW |
| 228245 | KLACE | 299734 | LLLET | 341094 | KAKGK | 366608 | LPKCL |
| 228251 | QSSAE | 299736 | NMSKE | 341108 | NKLDY | 366618 | YTSSK |
| 228264 | KSASS | 299752 | LKATV | 341112 | NTKVF | 366620 | DAFLG |
| 228280 | EFQEV | 299759 | DLSVL | 341117 | HLGQV | 366623 | RATPT |
| 228284 | LFLRK | 299761 | LSARS | 341134 | PPFPF | 366624 | PQPSK |
| 228289 | ECGKA | 299764 | YPYTS | 341139 | KYQIE | 366628 | ELPST |
| 228318 | LGLTQ | 299766 | LSSRY | 341141 | APPLG | 366629 | VRLFT |
| 228327 | LESTL | 299767 | EKDEL | 341145 | TRFHC | 366630 | PRRRC |
| 228347 | SKYNE | 299798 | RGSRL | 341151 | RNIHT | 366632 | KLESK |
| 228434 | NKPYK | 299824 | CCRIS | 341159 | EMIPK | 366634 | FSWLL |
| 228437 | LSAHK | 299828 | DEFNR | 341165 | TGERP | 366637 | PRRRC |
| 228438 | RKRIH | 299847 | SKDFA | 341171 | APRIL | 366638 | KLESK |
| 228463 | HSFLP | 299853 | GTVQS | 341178 | SEPSF | 366640 | LESKP |
| 228468 | EDFTC | 299855 | SWLNC | 341179 | MCLHR | 366641 | VTSEQ |
| 228476 | PPSHL | 299866 | EIHQH | 341187 | AASED | 366642 | SHGSP |
| 228495 | AHLHQ | 299871 | IGEKP | 341199 | LMQSS | 366645 | DWAKF |
| 228506 | CLCRL | 299882 | QDGVL | 341206 | PEQIH | 366653 | QGGPC |
| 228510 | ALDGL | 299886 | SSMTK | 341208 | RGSLS | 366654 | GSLEA |
| 228515 | LPLAV | 299906 | VDVLM | 341213 | ARVVT | 366655 | FMFTH |
| 228534 | ATLSP | 299927 | LSPQV | 341214 | ATSKK | 366656 | KIMTC |
| 228567 | PPSTP | 299933 | PPTGN | 341217 | SNASR | 366667 | TRKKP |
| 228606 | QFLDR | 299952 | WSGTL | 341218 | SLSVR | 366671 | HAYKK |
| 228641 | EVVEK | 299957 | FNDVL | 341220 | CHLLH | 366672 | SEREP |
| 228644 | IYHVL | 299964 | LSRPL | 341223 | DSDSD | 366673 | TLSGL |
| 228682 | LNSSA | 299974 | LHVSP | 341227 | DFGNY | 366676 | IKGEV |
| 228705 | GNKLS | 299977 | LKASV | 341236 | IHTGE | 366677 | DQVCT |
| 228740 | DLKVD | 299989 | NLEDK | 341237 | IDTGE | 366679 | HHKAK |
| 228741 | NSQKS | 299992 | LGHLL | 341243 | LFIQT | 366682 | ITNLS |
| 228799 | LQDPT | 299997 | CHVDF | 341247 | VPEKD | 366688 | QLRVS |
| 228811 | EQPLW | 300006 | QCNIM | 341253 | PRPHF | 366689 | VDILV |
| 228820 | LIDFH | 300013 | LKVQT | 341256 | KTYTV | 366690 | PMFIW |
| 228825 | SGPGQ | 300022 | DNGWD | 341261 | GAPQP | 366693 | PRRPC |
| 228827 | ECQDE | 300026 | AIAKE | 341266 | PFPRS | 366696 | GDTIC |
| 228837 | FLPRI | 300030 | VLEPD | 341267 | DNEGE | 366697 | SRKTI |
| 228841 | GEEKD | 300035 | NDEKE | 341268 | NGGLA | 366699 | LLLNV |
| 228843 | NATST | 300051 | PGKVL | 341271 | GGGWL | 366702 | YVVSP |
| 228850 | LMVNL | 300055 | LRKKS | 341274 | SGKKP | 366704 | LFSEK |
| 228858 | LLTDV | 300056 | KLKTR | 341278 | QKLFP | 366715 | EMSPF |
| 228862 | IIEVS | 300057 | PEEPK | 341280 | ASSSS | 366720 | THSLS |
| 228865 | NSNSW | 300060 | TENSK | 341282 | IKELF | 366727 | KKEEC |
| 228887 | DAGGV | 300061 | MLDEL | 341285 | SGRRF | 366729 | GGCEL |
| 228918 | FITHD | 300069 | YRQFC | 341289 | EEEVA | 366731 | LWEGI |
| 228922 | VCALT | 300079 | NLVPF | 341291 | QSHKD | 366734 | LFFFG |
| 228928 | VKAAS | 300086 | EFRKK | 341295 | TRRRR | 366736 | KKEEC |
| 228929 | FQKVE | 300087 | PLTQV | 341302 | TWDGG | 366739 | PMAIT |
| 228936 | SKSRV | 300093 | RLKAS | 341308 | PGVGS | 366740 | PERSD |
| 228938 | RRGTK | 300098 | PLTPS | 341309 | VREEG | 366743 | GWRHM |
| 228945 | KEWTE | 300101 | KNPDS | 341314 | GEFLY | 366745 | VVGPL |
| 228955 | LKVSA | 300105 | RTTPV | 341324 | ITFDD | 366746 | QKALL |
| 228958 | IKLYL | 300107 | DAANS | 341327 | PEQQC | 366747 | HPGNP |
| 229002 | RRKSV | 300113 | IRILK | 341342 | GAVSV | 366751 | SSISS |
| 229003 | IVSST | 300119 | EVTVQ | 341346 | PDAVC | 366752 | HPGNP |
| 229022 | GNEIS | 300127 | SRKWG | 341351 | KKLKT | 366754 | LFSEK |
| 229030 | SPTCV | 300128 | NNFLT | 341360 | AQDGH | 366755 | VEDSC |
| 229043 | IVAEA | 300131 | EASRQ | 341361 | IANTV | 366758 | QEHMQ |
| 229088 | GTKKR | 300134 | ANPSW | 341363 | CQTLI | 366760 | DFLYP |
| 229134 | LESSQ | 300145 | YYSNI | 341364 | PDFDD | 366765 | LFSEK |
| 229135 | RRASQ | 300146 | VQGIR | 341368 | RKATS | 366766 | EKEYE |
| 229179 | YEIQL | 300147 | AQQKL | 341380 | SNLTL | 366770 | LHPVI |
| 229195 | AQQAF | 300151 | MPKRV | 341382 | SKGLC | 366772 | PMAIT |
| 229201 | DDEDD | 300161 | GEGEN | 341409 | RTCRK | 366773 | PMAIT |
| 229214 | KKKKK | 300167 | RAKQK | 341412 | LSTLK | 366776 | PHLGF |
| 229238 | HGKFR | 300175 | DKDPE | 341416 | FPLCP | 366783 | SEQPF |
| 229239 | MASKE | 300176 | TNPFL | 341422 | ARVEL | 366785 | RMGIS |
| 229243 | LGQFG | 300177 | SIDLD | 341427 | KWNPL | 366786 | DPLSG |
| 229251 | WSKSN | 300179 | WDTAI | 341442 | VKIMK | 366787 | KKEEC |
| 229264 | LKIWN | 300181 | NGPSV | 341443 | HTILP | 366788 | KGQGT |
| 229265 | PLVES | 300182 | WKQTV | 341451 | TASLY | 366789 | IQVDD |
| 229266 | QNNMD | 300184 | SRSWI | 341455 | SDTSN | 366794 | AQTSC |
| 229268 | QRVAS | 300187 | NPLTG | 341466 | RSPPW | 366797 | KSTQF |
| 229270 | INAKQ | 300190 | CEQCC | 341467 | GEDDS | 366800 | IDTDG |
| 229274 | YLLYQ | 300192 | NIGIN | 341473 | KELEK | 366802 | PILSS |
| 229277 | NPSVL | 300209 | EPRPA | 341479 | LTLPP | 366811 | SCPWL |
| 229281 | SVAAS | 300213 | SELEL | 341481 | DKLGQ | 366813 | ALSAA |
| 229304 | SVAWR | 300215 | PELSA | 341483 | TTGST | 366814 | PRRRC |
| 229307 | QPEDV | 300226 | IQANK | 341489 | INVCL | 366821 | NWQSN |
| 229314 | SNNMV | 300233 | EKGKS | 341490 | EAKEY | 366822 | PAWAT |
| 229319 | DLKDL | 300245 | KTVAT | 341497 | QKLHE | 366826 | SRKKI |
| 229328 | LYKPI | 300249 | QQEEY | 341502 | PQMKG | 366827 | KCEVA |
| 229329 | NSCQK | 300255 | MGQFY | 341504 | LLPYA | 366828 | EWLEF |
| 229330 | KAPLN | 300258 | RRGGV | 341522 | KKEKN | 366829 | FNEAQ |
| 229332 | MKIHL | 300283 | IHTKH | 341528 | EDFSM | 366833 | FMFTH |
| 229335 | RTLGL | 300289 | AQEDL | 341539 | GEAIK | 366836 | SSISS |
| 229340 | KKRCC | 300291 | NFIYN | 341543 | AKDSL | 366838 | VIETV |
| 229379 | GYEDE | 300302 | PAIAN | 341549 | TKPAG | 366839 | PERSD |
| 229384 | PFPHS | 300303 | LEADI | 341550 | RGCGG | 366840 | PMAIT |
| 229390 | PFRPY | 300398 | SHIRN | 341551 | PQPLD | 366843 | HQQQL |
| 229395 | SLRKS | 300399 | GKSAP | 341552 | GDESY | 366844 | GFGKS |
| 229402 | VYPDS | 300404 | LQCAA | 341562 | CMTSQ | 366849 | LWEGI |
| 229416 | TDSSN | 300406 | GCLIS | 341564 | FCSKK | 366850 | GEFLY |
| 229447 | GPPRT | 300408 | LQLPQ | 341565 | EPMEC | 366853 | GFGKS |
| 229554 | EDDYD | 300413 | GGPRR | 341572 | EKYIL | 366856 | GKILK |
| 229563 | FNRPH | 300415 | EDNYL | 341581 | AKGSK | 366863 | IGNKP |
| 229570 | TSKWD | 300417 | IYHSS | 341584 | RFSSP | 366867 | GEFLY |
| 229595 | HMDCM | 300433 | DNPAF | 341597 | PLLEH | 366870 | LWEGI |
| 229606 | WSVFS | 300434 | VIESH | 341610 | QRVTK | 366875 | LWEGI |
| 229633 | EKLRT | 300441 | RHLNL | 341625 | YMAED | 366876 | KLFLD |
| 229702 | LWLLH | 300452 | VQGLA | 341633 | AQTRL | 366880 | LGMAA |
| 229707 | TRPHS | 300456 | GEEKL | 341634 | ASREP | 366883 | RDTQM |
| 229708 | ILAGR | 300458 | AHLTD | 341636 | MDTGR | 366886 | PDELH |
| 229715 | LQQKQ | 300504 | KDFFL | 341637 | LLPLQ | 366888 | KLYKV |
| 229725 | VYGTL | 300515 | NITII | 341640 | GSRSS | 366898 | SAQAD |
| 229758 | NLRRL | 300525 | TWIYP | 341641 | VRDTM | 366901 | HLMLT |
| 229769 | KHLGP | 300527 | IRWIC | 341652 | KQAAG | 366903 | FRAIN |
| 229771 | KLACE | 300557 | GRSSK | 341657 | EKEPS | 366908 | GGGWT |
| 229794 | EEMES | 300571 | GRHLW | 341662 | SHPWK | 366915 | KRHQN |
| 229812 | MKAAK | 300574 | DEDFS | 341674 | VGSDP | 366918 | RVVLE |
| 229824 | QQLAQ | 300575 | FQKGA | 341677 | KRAWP | 366921 | WEVQL |
| 229829 | SSVPR | 300576 | VMQDT | 341681 | PEFSV | 366922 | YVACT |
| 229854 | IIFLI | 300584 | KSGWS | 341682 | RLSRT | 366923 | PDDRM |
| 229903 | PLAGR | 300589 | TRLLL | 341684 | QKEQK | 366924 | LKAFH |
| 229922 | AEIMA | 300605 | LQHLL | 341692 | HCAYL | 366926 | RSDLI |
| 229955 | HRTVV | 300618 | HQTYF | 341700 | GQNFG | 366927 | PQKNS |
| 229971 | KSFTQ | 300619 | KPLLY | 341715 | QVVWR | 366934 | CRKMK |
| 230012 | DRDSL | 300647 | RGVPY | 341719 | SPSLT | 366936 | AVRTL |
| 230036 | SLGSD | 300648 | DTILT | 341723 | SQSVR | 366939 | PEYSE |
| 230048 | KHLGN | 300650 | CPTLK | 341734 | AESKL | 366942 | TGVHA |
| 230050 | FKCKK | 300651 | ALIGN | 341737 | NWVQF | 366948 | QPSCC |
| 230053 | VKIEV | 300658 | KFKLD | 341742 | FPPGF | 366950 | QPSCC |
| 230085 | KIRHA | 300659 | RSDGL | 341745 | APCSV | 366951 | HPAPM |
| 230099 | PPPGD | 300671 | TMNPG | 341748 | SPGAP | 366953 | YQPKF |
| 230122 | GQEQS | 300681 | TELLL | 341756 | GPAED | 366955 | SGSCC |
| 230124 | RNRYL | 300682 | YSAPA | 341762 | WKYCE | 366962 | YTSSK |
| 230215 | FFCKK | 300688 | IGYDV | 341765 | TVQQR | 366970 | NGPEA |
| 230221 | AMFKL | 300692 | WARNK | 341779 | TVLYE | 366974 | YGFGG |
| 230223 | SKLTY | 300714 | AFLNA | 341782 | KKKYI | 366975 | YLVPL |
| 230236 | GGLFM | 300737 | KPLKK | 341785 | DDTLL | 366976 | CQPSC |
| 230256 | IQTKM | 300738 | LMCGS | 341787 | PVSWG | 366978 | CEPTC |
| 230260 | GPMQH | 300747 | LDGED | 341797 | ESDDG | 366979 | AARAP |
| 230301 | RGNRR | 300762 | SSDIP | 341803 | GLYCE | 366984 | ENCCL |
| 230321 | LCFSS | 300773 | HRIGT | 341815 | ACISG | 366988 | LFKNN |
| 230340 | PITVE | 300778 | NMHSR | 341819 | ECRQM | 366995 | ASTAL |
| 230354 | FRKTT | 300784 | RRLLK | 341821 | ELQAM | 366997 | MKLGK |
| 230361 | KSAMF | 300793 | SRRGT | 341823 | LSFSA | 366999 | RGERA |
| 230381 | APEAG | 300809 | PEPAQ | 341826 | SGRRF | 367004 | KLDSI |
| 230402 | SQEAL | 300835 | QPHWT | 341828 | CCNWA | 367005 | LEDGF |
| 230419 | VDSKP | 300849 | EEGPA | 341831 | SFLRQ | 367013 | LQRGP |
| 230431 | PDPTT | 300850 | LSFSL | 341838 | KKFES | 367019 | IREEG |
| 230449 | TMMKT | 300870 | TREKL | 341841 | PRRRR | 367021 | DILYK |
| 230495 | RGERA | 300873 | FCVLL | 341843 | PEISP | 367023 | RRKIT |
| 230510 | KRGKK | 300900 | AGFLR | 341848 | FTGHL | 367024 | GGCCH |
| 230538 | SCPAA | 300901 | GVLEL | 341867 | FPTKP | 367028 | AEQTV |
| 230565 | PLLQA | 300917 | KAVTQ | 341874 | LLYDE | 367034 | YGFGG |
| 230568 | TIMCS | 300935 | RCVLL | 341882 | IQPLI | 367037 | QPPPP |
| 230588 | QRPRK | 300952 | EFVVA | 341885 | AVATT | 367046 | QCSSP |
| 230640 | ASLYL | 300954 | LPAGT | 341890 | LGLVA | 367049 | ENMTS |
| 230643 | KVSAL | 300961 | GKGRD | 341905 | LDQTT | 367050 | KKKAE |
| 230658 | SPIEA | 300965 | VPGGT | 341909 | QAQRS | 367055 | KLTWS |
| 230671 | EESMM | 300976 | AGTRR | 341912 | RPMKH | 367059 | DIAKY |
| 230732 | YSAVH | 300983 | PGKPK | 341914 | EFTSS | 367064 | LTWDS |
| 230771 | RLSES | 300992 | RQTTR | 341924 | LQLKT | 367065 | LWRPW |
| 230792 | INPNL | 300996 | HKKIH | 341926 | QAKQQ | 367066 | APHTG |
| 230859 | VSLSR | 301007 | RGFLP | 341934 | RSEMK | 367070 | EKGHS |
| 230882 | NKIMP | 301011 | IPGKA | 341938 | EAKYY | 367075 | VIKQP |
| 230902 | FGKKY | 301012 | PKPAA | 341942 | FWARL | 367081 | TLTRL |
| 230914 | QLLEN | 301015 | TREKE | 341944 | SDILK | 367086 | AEPQP |
| 230990 | MTNSH | 301019 | AEEGL | 341947 | CAMNC | 367096 | KEHQL |
| 230993 | NISVN | 301021 | MIQVC | 341952 | DCVLG | 367098 | EGVLY |
| 231004 | TISPY | 301031 | SHLKE | 341961 | PRRPC | 367102 | EKNGL |
| 231009 | PPHTN | 301037 | MGERG | 341963 | IVVPT | 367104 | GEKSS |
| 231021 | DSDRD | 301038 | QNLVY | 341966 | HRKAL | 367111 | EDVKR |
| 231061 | KDLVI | 301039 | NPNLS | 341974 | LYEVM | 367124 | FPYAA |
| 231121 | LELNQ | 301042 | GTSVF | 341985 | ISFQS | 367127 | FSFFP |
| 231130 | SFEFS | 301043 | PTCCP | 341987 | HHIKI | 367130 | GDDLN |
| 231134 | SFGLN | 301046 | LCEKL | 341988 | FPPTK | 367137 | TFTHL |
| 231136 | SFPFS | 301050 | PKDSY | 341992 | PSMST | 367139 | HFGKC |
| 231137 | NNLGF | 301057 | GESSE | 341998 | RFSSS | 367142 | YVNPC |
| 231173 | SEFLE | 301061 | VNVCK | 342002 | TGEKP | 367145 | AAKNR |
| 231189 | AESGL | 301067 | RKWMN | 342007 | RFSIN | 367151 | VAVRK |
| 231198 | LDEDS | 301068 | RCHLM | 342008 | KVTTF | 367157 | APVLP |
| 231228 | SVPCS | 301071 | EGEEY | 342011 | LFDEI | 367158 | TDIAY |
| 231238 | PNNNR | 301072 | EGEEY | 342015 | SEAKK | 367159 | TDIAY |
| 231283 | QKIFL | 301073 | KGEPA | 342019 | TAWMQ | 367162 | TDIAY |
| 231357 | KPFCA | 301093 | TGKKS | 342021 | EKPCE | 367163 | TDIAY |
| 231420 | ERRAK | 301096 | SNTCN | 342023 | EDDYI | 367164 | TDIAY |
| 231449 | SKCSS | 301141 | SFLPR | 342026 | YTPQP | 367166 | HGLLV |
| 231454 | WIIES | 301146 | SFLPR | 342032 | KQAKK | 367172 | DTVEN |
| 231461 | KCVKQ | 301149 | HPEHM | 342033 | EEDVE | 367173 | REHPT |
| 231482 | QQTTL | 301159 | MYERQ | 342050 | QQGLP | 367177 | ANENV |
| 231484 | SSRCL | 301171 | LIRMQ | 342053 | DGSGD | 367185 | VGLSA |
| 231487 | WCEEK | 301173 | AITST | 342056 | DSKSG | 367187 | DCGQL |
| 231498 | LERLH | 301178 | QEDGA | 342059 | LENRP | 367189 | GGRSP |
| 231504 | PDYFL | 301180 | VAYNM | 342070 | YWEKI | 367193 | AELER |
| 231509 | LFHQK | 301190 | RMAQK | 342071 | IKGIM | 367196 | LPPKK |
| 231512 | NDYIF | 301200 | DVIGL | 342082 | SPVKA | 367197 | LKINP |
| 231524 | VLDVA | 301202 | GFDAP | 342083 | DSDLE | 367198 | ILGMV |
| 231526 | IKVES | 301204 | PLRDL | 342087 | RVYFQ | 367201 | KLNKI |
| 231572 | PVQRM | 301215 | DTAFV | 342097 | LLPPT | 367202 | LWTYN |
| 231589 | ISSVS | 301218 | SNFHV | 342098 | TTRPL | 367203 | PSASS |
| 231656 | EEFLP | 301219 | AAAGR | 342100 | ARHFS | 367207 | RNSCA |
| 231668 | LFPFL | 301226 | LEAQA | 342102 | HISIA | 367208 | EWKKY |
| 231706 | DYSPE | 301233 | KIHTH | 342104 | VATGI | 367212 | ASCTD |
| 231721 | EVEAT | 301242 | RTAHP | 342105 | PKLVS | 367214 | QICNQ |
| 231749 | GDRAK | 301244 | NTYVL | 342107 | HLASE | 367216 | VPSAG |
| 231751 | EFLRK | 301246 | KEAPH | 342109 | NPIGK | 367219 | SRASR |
| 231790 | VFERC | 301249 | SKTGV | 342114 | AIHGG | 367220 | GVTVR |
| 231887 | PSSKL | 301258 | GPGQL | 342118 | GRSLP | 367223 | FRTVL |
| 231908 | PMAGG | 301260 | LHRSS | 342121 | IANNG | 367224 | PQQHF |
| 231948 | VILCL | 301263 | LAPSL | 342137 | VQLRE | 367226 | LELEA |
| 232003 | HTFPK | 301264 | ECGLR | 342143 | EDTEM | 367228 | VENKA |
| 232014 | LPKAC | 301272 | KVGEE | 342148 | VLFIK | 367229 | PCEGV |
| 232125 | KAKTE | 301280 | PLGAS | 342154 | RRRLS | 367244 | LTNRN |
| 232165 | GFGML | 301281 | IEKLL | 342156 | PVPGG | 367246 | ATGVS |
| 232217 | VFKKK | 301284 | LDEES | 342162 | PGDPF | 367247 | WREAE |
| 232219 | FKKVQ | 301286 | PAGGQ | 342169 | EWGNS | 367248 | ATGIF |
| 232375 | VPAHQ | 301293 | APPVP | 342179 | QCREM | 367253 | SQSRR |
| 232424 | RPWRN | 301295 | TRVEI | 342181 | GKGGW | 367255 | ATSDL |
| 232461 | DCGLF | 301305 | DDITF | 342188 | VKGKP | 367258 | GKIFK |
| 232496 | ILYEV | 301318 | SLPSP | 342190 | EQPQV | 367263 | STKKE |
| 232501 | IICWK | 301323 | LQVAR | 342197 | PRGEM | 367265 | IHEKV |
| 232508 | KRIQP | 301327 | PSTFL | 342205 | SLLPF | 367276 | EADTT |
| 232519 | NEAQR | 301332 | CWQRR | 342207 | PIRQY | 367282 | DEAHS |
| 232564 | LRIWN | 301336 | AAPEA | 342216 | LQEEP | 367284 | LGLAS |
| 232603 | KTSEN | 301364 | QGGME | 342222 | LLQSN | 367288 | SLYYS |
| 232607 | SRLGV | 301391 | CSFPL | 342228 | ASPRS | 367291 | GEAQI |
| 232744 | IGLDC | 301396 | TEPDS | 342235 | RNTVV | 367298 | AKPCI |
| 232766 | PLLTI | 301399 | DIVSE | 342240 | GKPQL | 367299 | FMTQS |
| 232854 | RRSGP | 301406 | RLPGP | 342254 | EGAMY | 367300 | KPSSL |
| 232863 | VRNIK | 301408 | PILPQ | 342259 | AAIKL | 367301 | EECNS |
| 232888 | PAAGS | 301411 | RTGRA | 342267 | QLEAY | 367304 | EVKKQ |
| 232892 | LKENL | 301419 | ELLLV | 342268 | TRRLD | 367308 | GDVGD |
| 232905 | KVHGF | 301420 | IAENS | 342276 | PPFPT | 367309 | LLVRV |
| 232907 | LPSDS | 301439 | PEGPS | 342278 | SKRNF | 367310 | FLSFN |
| 232974 | MNANN | 301446 | SEVSE | 342291 | REDNV | 367314 | KFTNK |
| 232975 | MKGVE | 301452 | DDKDC | 342295 | TSDEN | 367315 | EEEDL |
| 232978 | SSRYS | 301455 | AEAAS | 342300 | FIMVN | 367316 | KTPEA |
| 233025 | HAKNN | 301457 | DQPYL | 342307 | IPELQ | 367318 | STITI |
| 233027 | ENMNF | 301458 | KTSLP | 342313 | SQPLC | 367319 | TPLST |
| 233047 | GLYQE | 301459 | PAPSL | 342322 | TPLLL | 367323 | KDYRS |
| 233055 | GFSPH | 301463 | HPLSG | 342333 | RGKTH | 367330 | QEELK |
| 233057 | ERHTC | 301464 | TGSSG | 342335 | PETSV | 367343 | NLSPE |
| 233072 | AGKAA | 301466 | WSCHT | 342336 | PGVPP | 367345 | EKNNS |
| 233078 | HPYRR | 301475 | HNRWI | 342343 | PTEHA | 367346 | GKKSQ |
| 233084 | LFRTF | 301480 | HLKTH | 342356 | SNSRG | 367348 | KHAGE |
| 233092 | QHDEL | 301488 | RNART | 342374 | LIAGK | 367349 | NEQLF |
| 233099 | KTSFF | 301522 | FSKHN | 342375 | VIFRS | 367352 | RTETQ |
| 233114 | FLSSA | 301529 | SFKSM | 342380 | NSPIS | 367355 | LLSVL |
| 233121 | DQDEY | 301532 | KVDSS | 342381 | ALFFL | 367356 | AFNIK |
| 233139 | IPFIF | 301547 | HKKTH | 342385 | AARHL | 367359 | PYMPE |
| 233143 | RSEIS | 301585 | RVDMD | 342391 | LKNPQ | 367360 | GRWRL |
| 233146 | IKVTT | 301587 | PIENL | 342392 | LGIFY | 367361 | KEEKL |
| 233154 | VRALQ | 301599 | GKVWV | 342394 | LNLSS | 367362 | FFLIK |
| 233156 | FVKNM | 301607 | PRSLR | 342409 | VHEED | 367363 | YLWKL |
| 233161 | YKGPM | 301624 | SGESL | 342411 | LRPLA | 367365 | NVSHK |
| 233190 | EPSIC | 301633 | LAAMD | 342413 | CPITL | 367366 | LKIMS |
| 233202 | GETSG | 301634 | CSPAN | 342422 | MTALL | 367369 | PLEIH |
| 233242 | LTIIL | 301645 | KFKHL | 342423 | AESGT | 367370 | QSCDP |
| 233270 | GLLLN | 301647 | HFSGR | 342426 | DQGVH | 367372 | SYLDS |
| 233336 | AFIKL | 301653 | QGQSS | 342433 | CHSIA | 367373 | FEFWL |
| 233379 | INKVV | 301656 | QRVSS | 342434 | RRQKK | 367378 | SSKST |
| 233468 | TDPPK | 301659 | LTKAS | 342445 | ASNYV | 367382 | PLRPA |
| 233535 | EPPQA | 301665 | TFTST | 342447 | LMVNT | 367385 | GLVLQ |
| 233545 | KAHRL | 301671 | ERVVS | 342448 | NKILF | 367391 | LAPVA |
| 233552 | KSSDQ | 301677 | QSLMD | 342466 | KKNNF | 367394 | SVFIP |
| 233557 | VTVSS | 301678 | YQSEA | 342470 | WDVHE | 367398 | KVIYQ |
| 233573 | KSNDD | 301686 | IFRKN | 342480 | ADVEP | 367406 | PSLSD |
| 233575 | GDEDL | 301691 | LENAY | 342481 | SKLTS | 367414 | ASWLL |
| 233604 | ITDRK | 301694 | LGIRW | 342490 | SKLGT | 367415 | VNARL |
| 233607 | ATLLE | 301695 | LITAC | 342499 | GPVLM | 367417 | PAACR |
| 233609 | FIPLK | 301698 | SHRSV | 342501 | SYSLA | 367422 | DSIFY |
| 233612 | GTMAI | 301701 | GFLLQ | 342502 | GGKKD | 367428 | AESTP |
| 233616 | MAEDY | 301711 | QPRKR | 342509 | EEPSS | 367429 | FEMMI |
| 233623 | LSQAR | 301714 | RPAEA | 342510 | VGVTV | 367432 | FEISC |
| 233638 | LASVV | 301717 | RCRRT | 342512 | FRRKG | 367439 | KATPK |
| 233668 | SEGST | 301719 | RNMCN | 342513 | EEDEE | 367440 | LDIIL |
| 233685 | LSQND | 301724 | LHLRS | 342518 | SIPLA | 367446 | DIERL |
| 233699 | EGTLD | 301727 | QTVIV | 342520 | LLLPS | 367449 | SYFLV |
| 233710 | IVFDK | 301729 | KEEKG | 342525 | SPSIS | 367454 | VRKRQ |
| 233712 | LNRYY | 301730 | NSTYA | 342528 | LSMVL | 367459 | CSKDR |
| 233714 | PAFEL | 301738 | RGSRM | 342529 | NTGSR | 367462 | SISNF |
| 233735 | CKFKN | 301740 | SSRSP | 342538 | EEASR | 367471 | LIFYA |
| 233741 | SGRKH | 301744 | IKNTT | 342546 | FAVRN | 367474 | TTTTM |
| 233809 | TQRMQ | 301749 | CTVEM | 342554 | LSVGK | 367476 | TYAKR |
| 233813 | SSNVE | 301761 | FEKPR | 342557 | TRTSH | 367482 | GFQVS |
| 233826 | TGLTE | 301764 | LTRIH | 342563 | LPSSS | 367486 | KIYAY |
| 233838 | VHSEF | 301765 | AWPGY | 342564 | PTMGR | 367491 | PLLNP |
| 233840 | EYLPQ | 301776 | ITDLP | 342570 | KGLML | 367495 | SMDRR |
| 233893 | GKYVD | 301781 | TCSSS | 342576 | ATKPS | 367497 | RILEI |
| 233944 | DALGA | 301785 | YQGYR | 342589 | RQSIF | 367498 | VTVVR |
| 233946 | HVPLG | 301788 | LGLVS | 342595 | EKLYK | 367499 | RSVMD |
| 233948 | LSLCL | 301790 | KPITA | 342602 | HLQNY | 367510 | KEYYV |
| 233954 | AAQKQ | 301807 | KQRKY | 342604 | RYFTF | 367527 | SLLDT |
| 233957 | VLSES | 301819 | RSLRP | 342606 | FNEVG | 367528 | AANPE |
| 233969 | GSEKP | 301825 | AVDSD | 342609 | SVKIT | 367530 | IMQNF |
| 233997 | GPGPA | 301831 | QAVGH | 342610 | AQAGS | 367543 | GKCIA |
| 234038 | TFVRF | 301838 | TSEAS | 342623 | ALGSF | 367545 | EAEIH |
| 234071 | KSWAP | 301873 | PQRRR | 342626 | ELEYL | 367550 | GPIKP |
| 234091 | KALCG | 301885 | PGSPA | 342628 | RAHLS | 367555 | RAAGE |
| 234111 | ASINV | 301886 | SQLPP | 342667 | IQTEI | 367563 | KKEIS |
| 234142 | TGRHI | 301887 | AQVHF | 342680 | TPPEP | 367564 | QDCSH |
| 234160 | ASESP | 301891 | ESTSL | 342681 | GAQRL | 367570 | SSLSY |
| 234170 | KKQRK | 301896 | ASLGF | 342692 | KITVI | 367577 | FTGLG |
| 234179 | MEEDP | 301904 | SQSFY | 342697 | AHSTL | 367585 | VLLPA |
| 234195 | TKEEL | 301905 | LETDV | 342699 | EVINK | 367590 | GGDSA |
| 234198 | AGTIF | 301908 | QNGNV | 342704 | ARAAS | 367591 | SVTGL |
| 234256 | KESVL | 301917 | ASASW | 342709 | PMRLY | 367593 | LELKA |
| 234296 | EEEEA | 301919 | VQTHF | 342710 | RRILE | 367595 | GKIGF |
| 234301 | QPKNK | 301920 | KLSGN | 342711 | LWAGP | 367597 | LELSA |
| 234313 | SRTGK | 301921 | SYSVS | 342719 | LQHSK | 367598 | PLFVE |
| 234347 | AKGRP | 301924 | EELDG | 342748 | VMSTI | 367601 | RDKAR |
| 234371 | DNAPL | 301939 | LALAL | 342755 | GVEEI | 367605 | LELSA |
| 234388 | VPSEP | 301945 | PRPSV | 342779 | KVALR | 367608 | AETGA |
| 234389 | PGSQE | 301956 | ETGQM | 342780 | RPQAP | 367609 | WFSPY |
| 234392 | KKANT | 301962 | YGQGD | 342787 | PTKSS | 367615 | LLQYE |
| 234396 | PDTAL | 301972 | SAVMY | 342788 | LKFTS | 367618 | LRGRK |
| 234420 | LIKEL | 301974 | NSLKN | 342790 | DKLGQ | 367619 | MLWAL |
| 234453 | PSFSS | 301995 | VRITG | 342793 | MEVWT | 367623 | IEIAS |
| 234454 | DFYDK | 302005 | NSGCC | 342797 | KRLQI | 367625 | IPMLN |
| 234590 | NPLAK | 302021 | DMVEQ | 342804 | AKYTT | 367629 | VETDV |
| 234626 | KDMSL | 302028 | QTGLS | 342805 | PEIAS | 367631 | AALKT |
| 234701 | QLSIA | 302037 | LWFRR | 342810 | LSPAG | 367633 | SVKPS |
| 234739 | GNMMF | 302046 | LDSIL | 342812 | QMKDQ | 367635 | EAGQS |
| 234798 | FPAPD | 302051 | KCSVW | 342817 | PDECV | 367637 | ILTNR |
| 234816 | IKPID | 302057 | RKTME | 342818 | GVWIA | 367649 | FVIEQ |
| 234923 | LDMDL | 302077 | CRRLT | 342828 | GIRAW | 367650 | SKIHS |
| 234961 | GGAAA | 302079 | NSTTV | 342830 | EFEAM | 367652 | RGSVP |
| 235090 | ASVTE | 302100 | SYVQI | 342831 | RFAPY | 367655 | TLRSY |
| 235180 | AQTRL | 302105 | VTDLY | 342832 | DNGWE | 367658 | QRRCF |
| 235290 | EKKMT | 302107 | MDTGR | 342836 | LFSMK | 367660 | GVGCP |
| 235307 | EEDIT | 302108 | MTDDK | 342840 | TQAGS | 367662 | QSLFS |
| 235329 | LQPSR | 302111 | PAGRN | 342847 | GRGQY | 367664 | VSVLM |
| 235332 | PRQKP | 302114 | QQQFV | 342848 | QGDQP | 367668 | RCRVW |
| 235345 | GKGAV | 302120 | HYVTS | 342850 | VMNPV | 367672 | LMESV |
| 235347 | FHLCS | 302140 | TEGSD | 342858 | TSGWV | 367673 | ESGRS |
| 235349 | DQYCC | 302144 | SDSES | 342859 | SWGDG | 367676 | QKLTQ |
| 235372 | PFFKE | 302160 | PLRVG | 342868 | TAIRS | 367678 | LCCLP |
| 235382 | EPHAT | 302166 | RRKSV | 342875 | LGVNY | 367680 | SGKKA |
| 235439 | WKIKS | 302177 | SSLKQ | 342876 | EHTFH | 367681 | RPASV |
| 235521 | LVGFL | 302189 | HVLDV | 342886 | YTSSK | 367685 | ITDQA |
| 235547 | KSKTQ | 302194 | YRISA | 342889 | VFDAR | 367689 | LMVLK |
| 235628 | APSAQ | 302199 | ALRKF | 342904 | PLVGT | 367697 | KIRMD |
| 235657 | FSNVV | 302202 | MTDVE | 342905 | SSQQA | 367700 | ISSVK |
| 235790 | APSRK | 302204 | ELQLL | 342906 | CFAME | 367701 | TTDDK |
| 235799 | EHMRM | 302216 | SDEAS | 342907 | QKKDY | 367702 | PKTEL |
| 235835 | PNYFR | 302227 | WKVEL | 342924 | YLLSQ | 367704 | MEGDD |
| 235932 | SWSCC | 302232 | RGAPW | 342931 | HLECR | 367705 | SDNYW |
| 235933 | ALQAL | 302234 | PTPKP | 342935 | SIPDA | 367707 | QISKT |
| 236040 | LGSSS | 302239 | TDVAT | 342950 | HKELH | 367712 | YLFRG |
| 236051 | KNRTH | 302251 | EQARP | 342952 | SNVAS | 367714 | LWRPW |
| 236067 | VKMGD | 302260 | AFEAD | 342962 | NRDFD | 367715 | YAAVA |
| 236130 | YCNLQ | 302269 | YSEYC | 342970 | RREGS | 367721 | YRRTL |
| 236137 | QVTTS | 302274 | ASELL | 342972 | LEKQN | 367727 | EVPAE |
| 236147 | MNDPY | 302276 | EEPGT | 342974 | RMHNR | 367730 | STLGG |
| 236166 | TLTFY | 302289 | ESLGQ | 342979 | EQRAE | 367737 | LECSQ |
| 236192 | MKYRT | 302297 | VDLSA | 342993 | SLFSD | 367740 | NRFHA |
| 236273 | RGTAV | 302301 | EEDDK | 343000 | VMFSA | 367745 | EPTFP |
| 236291 | ETEAD | 302318 | LFSEK | 343001 | QNSDH | 367746 | LRVCW |
| 236495 | WGYFA | 302319 | VHEED | 343002 | FREEL | 367747 | VLLRL |
| 236671 | EAARL | 302321 | FMFLC | 343009 | GPGTA | 367748 | AQEKM |
| 236709 | GPGNK | 302324 | LDTTI | 343021 | LLTKK | 367751 | NLPVP |
| 236826 | NCRYG | 302327 | VGSDA | 343022 | GYSLT | 367752 | PLLAT |
| 236850 | KLNTQ | 302337 | DWWER | 343023 | IIMFI | 367755 | LTKHG |
| 236877 | HIRGF | 302355 | IQRRD | 343027 | DCGLF | 367757 | TEEGS |
| 236886 | KMGLH | 302383 | AQGTL | 343033 | YEKND | 367766 | YLELK |
| 236900 | AGEDA | 302386 | PTQEH | 343037 | EATAV | 367770 | DSKKN |
| 236925 | LPTKA | 302393 | NKLKL | 343040 | DDDDE | 367775 | VLSHC |
| 236938 | KATAE | 302397 | KETYY | 343052 | EDLEQ | 367778 | SGLYP |
| 236957 | AFNKI | 302413 | TEQVE | 343054 | FTEME | 367787 | LVAPC |
| 236959 | RLFHH | 302422 | QRKNM | 343062 | VIRKG | 367792 | PPAPR |
| 236976 | QGVLH | 302437 | TPSEV | 343064 | PRRRR | 367794 | QTCNT |
| 236979 | YRSHL | 302441 | VSMST | 343074 | SPLTK | 367795 | HPRKD |
| 236980 | VQSTQ | 302446 | TFLIP | 343081 | MKHDV | 367797 | AELEP |
| 236996 | CHKSD | 302452 | KGAKL | 343084 | IPSTL | 367798 | GYRSE |
| 237014 | TNPKE | 302455 | KVHTR | 343087 | QERPM | 367799 | RHPPH |
| 237172 | GGGKG | 302456 | PASSP | 343089 | PGPRA | 367802 | PRMGF |
| 237177 | VTTQF | 302468 | MAHIR | 343103 | ADTPD | 367806 | TGPCW |
| 237186 | AFLKM | 302476 | AIVEP | 343109 | LFGEK | 367807 | PGSQG |
| 237194 | EPKPS | 302485 | QVVGS | 343115 | HPGYR | 367815 | APKAS |
| 237201 | SEWNE | 302486 | HAAGV | 343116 | KRIHT | 367817 | EDTHL |
| 237247 | YLADN | 302490 | WLKKL | 343118 | EPIDV | 367825 | QVLLV |
| 237253 | APGYT | 302501 | MEDGM | 343127 | STVTL | 367828 | TLICS |
| 237261 | QNEVT | 302517 | TGFLS | 343129 | SNEAP | 367830 | TEESV |
| 237264 | RKEIL | 302521 | WWYHS | 343140 | QPAAQ | 367832 | QTPKL |
| 237275 | ASRAQ | 302530 | KRSRK | 343144 | PAVTL | 367835 | EYNAL |
| 237281 | LKPVL | 302537 | FWGKT | 343155 | QLISV | 367844 | AITPG |
| 237283 | ECQKS | 302543 | FRWFQ | 343158 | EDGED | 367845 | KLVHS |
| 237289 | KQMYG | 302548 | DLTTL | 343163 | EWHYL | 367847 | GFDAQ |
| 237316 | GTTAS | 302552 | NYISS | 343169 | TVRGG | 367848 | AAYAM |
| 237353 | GSSYC | 302562 | QGRSL | 343171 | KHKVT | 367851 | NKENF |
| 237380 | PLKPT | 302564 | LFSRK | 343172 | EQANQ | 367859 | VLTGP |
| 237455 | NDVPS | 302569 | KKFSM | 343190 | GFQQS | 367872 | LKIWN |
| 237500 | KDKDD | 302578 | EAVAH | 343199 | KLNPS | 367878 | DESET |
| 237512 | PIPSF | 302579 | AKWIP | 343204 | EALLK | 367879 | DLCSA |
| 237527 | RNSQG | 302586 | ALPPV | 343212 | RQGSS | 367882 | FSVFV |
| 237530 | KRTAH | 302599 | KWFWN | 343221 | GIAQV | 367891 | SVRIF |
| 237536 | LPPSE | 302603 | SCTSK | 343223 | PERKD | 367893 | PGATS |
| 237538 | RTKSN | 302606 | VSLSM | 343228 | SLRVA | 367894 | VTTIK |
| 237596 | SNVHV | 302620 | PKKKL | 343234 | DFLRW | 367900 | FSLKF |
| 237612 | LKKYS | 302621 | VAKSQ | 343242 | HRSLL | 367913 | ASEED |
| 237642 | WWGIH | 302625 | VERID | 343244 | MMISM | 367915 | KEYFF |
| 237654 | PVSVM | 302629 | NRTLS | 343246 | LTTSH | 367916 | RSMEY |
| 237694 | LSPAG | 302630 | TCTKA | 343248 | IEICV | 367922 | LVKNQ |
| 237696 | ELSNF | 302639 | GKKSQ | 343249 | VETLQ | 367923 | FQLPI |
| 237724 | SLPSL | 302640 | DSDSN | 343256 | IISRN | 367926 | ALTFK |
| 237763 | VLQMV | 302647 | SANKS | 343258 | GQRNH | 367928 | ERTNL |
| 237837 | FAKFI | 302648 | ECACV | 343271 | SSWSL | 367930 | GSSQG |
| 237841 | CYFSE | 302649 | KGFQQ | 343273 | ETLET | 367934 | YENDK |
| 237853 | AESWS | 302655 | GWSGS | 343274 | AKLYF | 367940 | AKAES |
| 237858 | IGALQ | 302656 | GGKFS | 343279 | DRKDP | 367950 | PLLLT |
| 237889 | DKKHH | 302657 | RSYTR | 343282 | YGFGG | 367952 | NRHHT |
| 238018 | PPPFP | 302665 | GKKGK | 343290 | NYTHP | 367957 | IGEKP |
| 238044 | NYDDY | 302667 | LFVTV | 343301 | MPVLC | 367959 | KVSCV |
| 238081 | EGAEN | 302676 | QVVTD | 343312 | PVGGL | 367963 | EEEEK |
| 238112 | LTPVH | 302684 | DPALA | 343313 | PQPTD | 367965 | FPPTT |
| 238138 | LGEET | 302690 | CCNTS | 343314 | STRRR | 367967 | LLRIF |
| 238146 | LEDDC | 302707 | ELQAK | 343318 | DCPPV | 367972 | SILCR |
| 238156 | TDRTV | 302716 | MTTSF | 343325 | VAGGC | 367976 | HFLGA |
| 238256 | IDWLG | 302719 | PHSKK | 343328 | IVHTL | 367983 | MSGST |
| 238341 | NASAR | 302724 | LSALC | 343331 | TPKNT | 367985 | RQLMT |
| 238349 | RYSTP | 302728 | NSLFT | 343339 | GLAQL | 367992 | KYLNA |
| 238379 | STPGL | 302741 | KQLYK | 343343 | MATEE | 367993 | REGFL |
| 238477 | TKLLV | 302745 | IQRRD | 343347 | LYEVM | 367995 | PYVSA |
| 238497 | FGQEG | 302756 | GGRGL | 343348 | FGTTV | 367996 | WERLE |
| 238508 | RLCSP | 302768 | RKRKQ | 343362 | LGGVS | 368005 | VSPAN |
| 238522 | DQEVN | 302770 | AAGEA | 343364 | TDSEH | 368007 | CLFFL |
| 238558 | LDSDS | 302777 | AQGPK | 343366 | AALKV | 368014 | LYGLE |
| 238576 | AFDIR | 302783 | SARAG | 343375 | KTFWS | 368017 | ESKNH |
| 238607 | AVPRR | 302790 | GTVKL | 343376 | TRKPP | 368025 | EEEQA |
| 238609 | EKHEE | 302801 | KPQLN | 343377 | QVYNV | 368026 | VPDPF |
| 238616 | CRPSL | 302805 | GRKEH | 343392 | GTQSH | 368030 | EPSPS |
| 238618 | FQIVK | 302811 | KVDSV | 343395 | DPIAV | 368035 | LLEEL |
| 238628 | QARHT | 302812 | NLLEI | 343398 | LQRSP | 368036 | LLEEL |
| 238633 | IVSHL | 302814 | SMSFT | 343412 | ERTAQ | 368037 | LLEEL |
| 238638 | SFRPM | 302830 | KVYIM | 343418 | DADGD | 368039 | DEAKL |
| 238647 | KERDP | 302833 | EVGPD | 343428 | NSEML | 368041 | LYELL |
| 238651 | IPSKV | 302836 | DKEQS | 343430 | IQAGL | 368045 | FLDIP |
| 238667 | SEDHL | 302843 | LRRGG | 343435 | FHLVR | 368046 | SRMEK |
| 238682 | SCKCS | 302846 | SEKCI | 343442 | KTADD | 368047 | AQMQL |
| 238686 | KSNWR | 302851 | VCTKV | 343443 | EYGKT | 368050 | PWGQR |
| 238688 | EKKDF | 302855 | SKDSS | 343445 | RFSSP | 368051 | LGFKI |
| 238699 | TGRLA | 302863 | KICGP | 343456 | ESGVQ | 368055 | GQVSV |
| 238714 | LTLNR | 302867 | IPSFH | 343458 | DKKEE | 368060 | SANIY |
| 238721 | LELPQ | 302870 | DVTFL | 343459 | IPKKK | 368065 | RSPLA |
| 238738 | CCLIT | 302874 | EGDAI | 343463 | FVHYH | 368066 | AVSKI |
| 238747 | PVPSV | 302886 | NEAGD | 343464 | HPPVL | 368070 | IESWP |
| 238788 | LISQQ | 302892 | NSVKI | 343469 | TWSCV | 368074 | CVYYW |
| 238789 | FETFL | 302895 | EQILK | 343477 | VWRPY | 368076 | LKKKT |
| 238831 | LYTGV | 302896 | DEEED | 343479 | CSIIV | 368077 | PVSSL |
| 238855 | EKADG | 302898 | AQMAS | 343488 | KVVSS | 368079 | NADER |
| 238875 | ITKLG | 302913 | FLQIS | 343490 | LRRQS | 368082 | LHKFY |
| 238892 | KQTSV | 302916 | GRAHP | 343493 | KAAAM | 368084 | ILPIG |
| 238918 | FQTEV | 302917 | PGYPV | 343496 | EQGRR | 368086 | FKEEL |
| 238936 | DVKMV | 302918 | LKSLP | 343497 | PVMQA | 368089 | CPVIT |
| 238971 | LSKKH | 302924 | APAGP | 343498 | VVSCP | 368098 | LCAWV |
| 238983 | SEDKK | 302935 | AAGDS | 343507 | PPVRV | 368102 | PYLRG |
| 238994 | LASYR | 302936 | QNPCE | 343519 | FPPGF | 368104 | GCGCR |
| 239032 | VSVVI | 302938 | IMPAN | 343521 | TVLSQ | 368105 | DQGVH |
| 239125 | GRARA | 302943 | TEDLS | 343526 | FYKKL | 368107 | DQGVH |
| 239138 | QLMLQ | 302961 | EMDID | 343545 | VVLGT | 368109 | DAMRE |
| 239144 | KGDKK | 302965 | ETSHM | 343550 | CHPDT | 368110 | DQGVH |
| 239151 | SAFQP | 302967 | SDVEI | 343552 | VKVDL | 368111 | DQGVH |
| 239165 | EEEEE | 302968 | QRWCP | 343557 | KKHKE | 368112 | DQGVH |
| 239223 | TSPSC | 302978 | QEKSV | 343560 | HFAFL | 368114 | GKAWG |
| 239231 | LPNFS | 302994 | HTSPS | 343563 | SRHRL | 368119 | TATIA |
| 239243 | MYHLS | 303015 | SPKSK | 343570 | HLWKI | 368124 | HSGSK |
| 239316 | VKLCT | 303019 | VIGRL | 343577 | VPKKP | 368125 | SSKLN |
| 239347 | LRRKD | 303028 | RSQIV | 343581 | IHNVT | 368126 | KPDSQ |
| 239367 | NGMYL | 303034 | VRDTM | 343617 | EEKLN | 368127 | EHHLS |
| 239440 | SQPLT | 303042 | KKGAS | 343619 | RAKDE | 368131 | TFIIY |
| 239444 | SLQLK | 303057 | EIADW | 343625 | VAIVA | 368132 | KTSKC |
| 239446 | GFNIQ | 303058 | SNASN | 343633 | KQRKK | 368135 | LQTVS |
| 239449 | GLNIQ | 303061 | RQPQV | 343635 | VPDDE | 368136 | LYKYV |
| 239450 | NNLGF | 303070 | EKCDR | 343636 | IPGEL | 368138 | DQDED |
| 239451 | QLEAY | 303071 | SHEQH | 343645 | FRSEL | 368140 | QVIKD |
| 239468 | PQFIS | 303076 | RQKFL | 343656 | IEPRV | 368144 | CASLS |
| 239587 | NKQHS | 303077 | IGIKL | 343657 | GIFRM | 368150 | PRLCH |
| 239597 | QKCIH | 303088 | DHKHR | 343665 | PYVKT | 368154 | GWIIQ |
| 239666 | ERTVH | 303096 | KKVFS | 343674 | GMSED | 368155 | DSPSQ |
| 239690 | VNTEN | 303108 | MNGDF | 343675 | TKLPG | 368164 | QLQTM |
| 239730 | CVEFH | 303111 | WKHIL | 343676 | KKQYV | 368165 | RPDGR |
| 239761 | EHSVI | 303129 | MPFIQ | 343677 | RRDLR | 368166 | FVDIM |
| 239830 | ELRLC | 303136 | PERSD | 343686 | LVSIT | 368173 | EIQLS |
| 239849 | VRDID | 303145 | KKLIE | 343690 | ITSLS | 368180 | DLNEM |
| 239854 | HYMSC | 303147 | KKLKY | 343695 | FSLSS | 368184 | IVFTI |
| 239882 | EPNSF | 303148 | THPWE | 343701 | EGFQL | 368186 | EKDEL |
| 239891 | TRKMN | 303149 | KGIGL | 343706 | GYSAP | 368189 | SSILP |
| 239893 | SMKPK | 303151 | VKVDP | 343709 | APQES | 368190 | RGHLV |
| 239906 | LIEEN | 303153 | NVKGP | 343716 | AEEAA | 368192 | CCPFP |
| 239926 | ESEEL | 303158 | QEDQL | 343718 | PDRMQ | 368199 | ACHNI |
| 239938 | TIEIC | 303163 | ECYGF | 343720 | GRDAL | 368207 | RVKET |
| 239940 | RDSGF | 303167 | MIYKN | 343739 | MDTGR | 368208 | RSCIF |
| 239944 | IRMGM | 303170 | VEESH | 343741 | WTPYM | 368218 | CNFLT |
| 240050 | LNVEE | 303178 | QRWCP | 343742 | GCYIS | 368219 | PFLKF |
| 240055 | QIQFS | 303182 | NIQLF | 343744 | PGSRE | 368231 | ISGIP |
| 240079 | SSFSD | 303191 | KRKRF | 343745 | QVPNS | 368237 | RLKTD |
| 240093 | DGTSA | 303192 | SKITL | 343746 | GSEQL | 368238 | VSNRL |
| 240100 | TSPSC | 303195 | ITSSS | 343747 | LVQHQ | 368241 | KKPKK |
| 240123 | YVAPV | 303204 | QARGV | 343748 | VQESV | 368244 | FSQRG |
| 240132 | LAGMI | 303206 | CKFKN | 343749 | VIFPQ | 368245 | SNVNP |
| 240185 | SGWGM | 303208 | SQELQ | 343757 | LWTLS | 368251 | APLWR |
| 240189 | LHLCC | 303212 | HTLDS | 343765 | SDSER | 368252 | EAKSD |
| 240285 | AKNGI | 303222 | LKMLI | 343770 | VILQF | 368253 | LCTKI |
| 240304 | DTQSN | 303231 | YLNAS | 343782 | SWGVS | 368264 | SSHPM |
| 240306 | SPQMM | 303234 | YSEYV | 343785 | QGKPS | 368266 | SSQPM |
| 240316 | STEPA | 303239 | SSPQT | 343799 | VRKQA | 368267 | HAPSA |
| 240327 | RLKQS | 303242 | KFAES | 343802 | KPLQP | 368270 | LLKIQ |
| 240328 | RESPK | 303246 | FVSTF | 343807 | KQEVI | 368273 | EKAGV |
| 240333 | KKTSH | 303248 | LNSYS | 343811 | GSKKD | 368280 | ALACP |
| 240335 | NWTDG | 303249 | EIDMA | 343818 | SRPGS | 368281 | LSLHH |
| 240343 | LFKSG | 303252 | LQPLF | 343819 | KFQVL | 368282 | ALACL |
| 240349 | MELTM | 303257 | KRGCD | 343820 | IRAER | 368283 | LSLHH |
| 240361 | SDLSD | 303276 | LDRII | 343841 | VKPNV | 368284 | ALACP |
| 240364 | SSLMV | 303279 | VVSGK | 343847 | QPAEP | 368286 | LSLHH |
| 240423 | VRQGD | 303282 | AWISP | 343864 | PSPSS | 368287 | ALACP |
| 240488 | FDYID | 303300 | VHEED | 343871 | QKKAV | 368288 | LSLHH |
| 240499 | KKIHT | 303315 | KGHAF | 343877 | HKKET | 368289 | HCSGH |
| 240615 | IACMI | 303316 | PITAG | 343880 | QDSDS | 368290 | ALACP |
| 240617 | KLDIK | 303325 | VDEYS | 343888 | LPETT | 368291 | LSLHH |
| 240618 | MQRTV | 303349 | SSPQT | 343890 | LLDLP | 368292 | KEMGN |
| 240619 | NLRVT | 303356 | GFWAC | 343891 | LQKLG | 368293 | ALACP |
| 240651 | EDYFD | 303366 | NKRFY | 343894 | VALIQ | 368294 | ALACP |
| 240652 | NYLPL | 303373 | KAKGK | 343899 | PEFVV | 368295 | LSLHH |
| 240662 | NTSES | 303394 | PVGTK | 343901 | QNDGD | 368296 | SASLS |
| 240687 | QHKQI | 303398 | KTSKK | 343924 | QSVVI | 368297 | ALACP |
| 240691 | KPFVP | 303408 | YTSSK | 343925 | NPQSQ | 368298 | LGLPS |
| 240700 | MWQES | 303423 | TNVQQ | 343930 | SSTSL | 368300 | HRRGR |
| 240727 | PEAQR | 303424 | MESSL | 343939 | LSFKQ | 368304 | SSQLQ |
| 240851 | GPGYR | 303434 | GRLVF | 343943 | TEPNS | 368305 | NVENA |
| 240922 | QKTDN | 303437 | TSVRK | 343948 | EGDVL | 368312 | GAETQ |
| 240986 | DDLTV | 303452 | EPLEE | 343966 | KRRRY | 368315 | FSQPY |
| 241001 | WPRLQ | 303458 | QGCLF | 343989 | YCVLQ | 368317 | MNSFV |
| 241014 | DIYLE | 303468 | QYLGS | 343990 | IPRLP | 368318 | FGSHG |
| 241041 | LPGHP | 303469 | FKKVT | 343995 | LVGFC | 368319 | GALFF |
| 241051 | EHFGD | 303476 | REDEG | 343996 | DADDH | 368320 | LRLRA |
| 241052 | EKANL | 303482 | SDVDS | 344014 | KGHPL | 368330 | STLGG |
| 241071 | PAPET | 303486 | RRQRP | 344023 | SLFDL | 368332 | GKEVC |
| 241124 | TGFPS | 303488 | ASLLK | 344026 | SSEGK | 368340 | PGGRR |
| 241125 | EDLAI | 303490 | SNSKK | 344029 | GLGAS | 368341 | TDRMQ |
| 241256 | SSINT | 303500 | LQKIK | 344030 | SNSAV | 368342 | AISAP |
| 241274 | TTYRF | 303507 | FSTEV | 344034 | YLADC | 368343 | IKVDL |
| 241279 | PKSFP | 303508 | MLGCS | 344040 | KGFTQ | 368347 | NLTNA |
| 241305 | RRQRG | 303511 | KFAAC | 344041 | MMPDN | 368351 | PMGPT |
| 241393 | SFHSS | 303515 | GSALA | 344042 | ETVPV | 368353 | RNFLI |
| 241416 | KESSL | 303518 | SSPQS | 344058 | FYLTP | 368357 | EAFCS |
| 241436 | DIFFK | 303522 | SNVLS | 344071 | NTRWK | 368358 | CAVKS |
| 241463 | PSALG | 303525 | LQLIL | 344077 | PQRLY | 368361 | TTEDE |
| 241502 | FVTVG | 303532 | CCKKP | 344083 | VPKKP | 368362 | IYEKV |
| 241527 | DDEEE | 303540 | KAKGK | 344087 | DIEAR | 368363 | EGNNK |
| 241600 | MSHSL | 303549 | MQSYG | 344101 | SLAHL | 368364 | WVKFW |
| 241651 | ETMPN | 303550 | PDRQR | 344114 | VYPIV | 368378 | MSLDD |
| 241802 | HQGLL | 303552 | AYNGM | 344115 | EELLY | 368381 | YFAGA |
| 241808 | TCRRH | 303554 | AVESQ | 344125 | LVCNT | 368386 | TMKQN |
| 242044 | SLQKR | 303570 | QVSEE | 344129 | SSSDE | 368388 | FYTSA |
| 242057 | SSGFL | 303575 | DCHAL | 344133 | GSIPT | 368389 | FLYRI |
| 242059 | IKFFK | 303578 | ALALY | 344140 | CVAHS | 368391 | TQESL |
| 242066 | EGYVY | 303584 | KFTKS | 344144 | ELPSV | 368396 | RQIWI |
| 242067 | QGVSE | 303585 | DDETF | 344149 | KSSGH | 368397 | MLTGS |
| 242104 | EMVHS | 303591 | RPPRP | 344151 | HGGNH | 368402 | LHFIK |
| 242108 | IKHER | 303599 | HPNYN | 344162 | MWESL | 368405 | SQEEQ |
| 242109 | TFNIC | 303616 | VGPLC | 344166 | QCYSN | 368412 | TIFTY |
| 242110 | TITKY | 303623 | KESVM | 344173 | SNHSI | 368433 | ATSYI |
| 242140 | QASAR | 303624 | QDAYF | 344174 | FSPLK | 368438 | DEEGS |
| 242152 | DPAMW | 303627 | SSEYV | 344182 | RIKQS | 368439 | DEDEK |
| 242158 | TLSTD | 303634 | DDGLP | 344192 | VHHVA | 368443 | NRIQL |
| 242159 | EDEEE | 303659 | LNSTF | 344193 | VEDST | 368449 | FLTTD |
| 242208 | ECGCS | 303666 | TRPPD | 344194 | SSVNK | 368450 | KTELV |
| 242209 | KHDEL | 303686 | PETRT | 344203 | YVSHL | 368456 | PASAS |
| 242210 | LQKIL | 303706 | RLKKL | 344210 | EASPA | 368459 | KSKDV |
| 242249 | TDTLL | 303709 | KRYAT | 344215 | RQYNY | 368460 | YKAKQ |
| 242257 | GTVKQ | 303712 | DSSRY | 344217 | TAVVI | 368461 | TCQTQ |
| 242261 | MSASH | 303713 | LRTSV | 344218 | IKVTN | 368462 | WVGDA |
| 242275 | LLKVI | 303727 | SKDFA | 344220 | DAAVQ | 368465 | VCSLI |
| 242285 | APLVH | 303736 | VHEED | 344223 | KTPSV | 368466 | GPSAP |
| 242310 | DGHGK | 303740 | KHLRC | 344226 | QPQAL | 368468 | YRLWI |
| 242315 | LKPPG | 303742 | HFIDR | 344235 | LGPEA | 368472 | GTVPS |
| 242317 | VKIKT | 303754 | AKMFA | 344240 | CWRYR | 368474 | PKTGN |
| 242338 | SSLLI | 303766 | PEVVM | 344241 | RVQWG | 368483 | FRMGT |
| 242351 | ACVIS | 303775 | CIRLK | 344242 | ITIVG | 368485 | SADHD |
| 242365 | QNFHS | 303777 | QLGGL | 344244 | PVADL | 368488 | KPAKV |
| 242375 | FHDEY | 303779 | LDLGS | 344254 | RNRCR | 368490 | SLKTC |
| 242462 | FSDFL | 303788 | PQELL | 344259 | KRPVD | 368496 | REGIP |
| 242465 | EDFML | 303800 | APEQQ | 344260 | AVDER | 368502 | IEAAF |
| 242475 | LCIVQ | 303802 | TGSLD | 344270 | RLWQQ | 368503 | LKPDD |
| 242480 | RTRTP | 303812 | EAKSD | 344276 | AELKN | 368508 | YFLME |
| 242505 | TRQGP | 303817 | EVQPH | 344277 | KTPSQ | 368511 | LHSIF |
| 242576 | DWKEL | 303818 | DSPIK | 344285 | GPHVL | 368514 | PPASC |
| 242577 | LFKSG | 303820 | KCHNT | 344298 | SLKFS | 368515 | QQADE |
| 242591 | DRLIL | 303822 | FRFLE | 344307 | RAYGW | 368516 | PRVKD |
| 242592 | RSYRS | 303830 | RSNPS | 344314 | LDDSW | 368517 | SHEPV |
| 242607 | LGEVN | 303834 | FMTLG | 344322 | SQATG | 368523 | TTTKH |
| 242630 | DWVYE | 303839 | GSAEI | 344327 | CRRIS | 368524 | PSACL |
| 242719 | SYETN | 303848 | PGRGS | 344331 | QEAEK | 368528 | SPGTK |
| 242728 | GKEAP | 303850 | LRRTR | 344336 | QAQRS | 368529 | YFFIK |
| 242729 | PQQKI | 303862 | RNCIP | 344343 | SPASD | 368530 | IGTER |
| 242753 | WILNN | 303864 | RKLFP | 344348 | FAAAL | 368532 | PNLVR |
| 242770 | LLFSL | 303887 | RRHRD | 344352 | GTLQS | 368533 | SGAFV |
| 242776 | IEQSR | 303889 | MSVIP | 344353 | NESAA | 368535 | RAEPL |
| 242784 | RPLVK | 303890 | VPETL | 344354 | SGAVL | 368538 | TLAKI |
| 242786 | SESGI | 303899 | RDTWE | 344361 | TCSLL | 368544 | SQPRN |
| 242796 | EDGAG | 303909 | FSTDV | 344364 | LTLTL | 368547 | GLLPT |
| 242804 | WRDTL | 303915 | MSVTI | 344374 | RARLS | 368552 | NETVS |
| 242810 | KCFKL | 303918 | LKHSS | 344387 | LRRLC | 368558 | IIFLL |
| 242819 | SRGRA | 303920 | HWCFC | 344392 | SDNDF | 368565 | SRAKK |
| 242827 | VKKFQ | 303928 | SRTHL | 344393 | GAPRF | 368568 | RRRGP |
| 242839 | EEQYI | 303939 | FIPIN | 344396 | SQNVQ | 368577 | TGISA |
| 242848 | ELCVS | 303942 | TEALD | 344398 | NNKNT | 368580 | IWCET |
| 242872 | EAFHQ | 303960 | VRADK | 344402 | PSLTH | 368589 | MSLYC |
| 242994 | TVFTE | 303963 | ILAAN | 344403 | HQDEH | 368591 | ENARP |
| 243045 | GINKY | 303968 | LELQT | 344411 | QGKHE | 368605 | YLVEP |
| 243052 | NGNLD | 303977 | IDIPE | 344419 | WREAS | 368607 | EDQAA |
| 243056 | HLHST | 303983 | FRSSR | 344424 | LLKEA | 368612 | MLSSV |
| 243077 | GDPLA | 303987 | AYRSL | 344426 | YSGPP | 368614 | ASTAF |
| 243082 | GNPLL | 303989 | EGKEL | 344430 | PLTDY | 368621 | SAGLW |
| 243103 | ALSFF | 303992 | AKKLE | 344431 | QALLT | 368629 | DRASS |
| 243108 | EKQKE | 303997 | ANMGF | 344446 | EGTIL | 368632 | VTAMG |
| 243152 | YQSHL | 303999 | MQVYE | 344453 | KRTFL | 368640 | CWRYR |
| 243167 | EKQSS | 304004 | LLNAS | 344456 | FDTDL | 368644 | RISNV |
| 243189 | LWIPI | 304006 | QTTIA | 344458 | KQIMN | 368646 | FDKLN |
| 243213 | FFCDT | 304017 | KLLKE | 344468 | EEFYA | 368648 | GQPRP |
| 243222 | LVAPM | 304032 | KQFHE | 344479 | DTLPF | 368660 | CWRYR |
| 243253 | GALLF | 304033 | IRRMN | 344488 | VHFLT | 368661 | ALKYL |
| 243286 | DIPYL | 304046 | FCEKM | 344489 | VHPSP | 368664 | TLASM |
| 243297 | WQQRK | 304051 | NDDTD | 344503 | YQSLR | 368665 | RAHLS |
| 243298 | GSSCC | 304060 | SFKTM | 344504 | AGKKK | 368666 | QITTV |
| 243300 | SNYDV | 304065 | WAICP | 344519 | KLYVD | 368667 | FYFLS |
| 243314 | EQEGV | 304071 | RTDSS | 344524 | GAGEQ | 368675 | VIIDI |
| 243325 | SSSCC | 304072 | MRKRM | 344536 | LEENS | 368677 | GVCPQ |
| 243326 | HENSI | 304077 | FLETK | 344537 | PQPAP | 368678 | PCPTP |
| 243344 | ASLRP | 304078 | IHKNK | 344545 | SQDGA | 368679 | YLCES |
| 243346 | AYFEE | 304096 | TSANL | 344549 | EQSPR | 368682 | SCRLW |
| 243347 | RFSHL | 304102 | RGLFF | 344551 | LKLHM | 368683 | NRAHW |
| 243349 | EDCKA | 304108 | LIPIN | 344552 | TPLQM | 368684 | TPATI |
| 243389 | TCAFI | 304111 | VKSER | 344562 | VDGTD | 368686 | PVLNL |
| 243440 | GCLPR | 304127 | TEFLN | 344563 | TEDLD | 368691 | ALTVH |
| 243451 | KLESE | 304133 | AMENM | 344568 | RIHTG | 368696 | EEKVE |
| 243457 | RESEI | 304139 | GRSRY | 344572 | RLYHD | 368699 | PGGRS |
| 243501 | EKTDL | 304146 | TGSAF | 344577 | PCHTH | 368716 | LANEI |
| 243563 | SFAKK | 304147 | CIDVR | 344579 | RPPEL | 368719 | LVQWI |
| 243578 | YGVEC | 304151 | VRLFT | 344582 | LSEES | 368723 | VKNIR |
| 243611 | KAKLL | 304169 | VDRPV | 344591 | HILSD | 368727 | WSVRV |
| 243639 | SGEKP | 304185 | NGNAQ | 344609 | MLAPH | 368730 | ENRLS |
| 243643 | PYKRN | 304188 | IINKN | 344616 | FKYVM | 368732 | ADRHL |
| 243644 | VTENP | 304192 | LGAEV | 344624 | QLQPP | 368736 | LISIR |
| 243662 | GCAKS | 304198 | RPEKR | 344626 | GQRQL | 368737 | ILATL |
| 243673 | IVTMS | 304223 | FNNPT | 344627 | YNDKP | 368741 | HLASE |
| 243706 | VSLED | 304226 | QYPYM | 344635 | PEMVP | 368743 | LYEVM |
| 243776 | QGNST | 304229 | HWPPG | 344637 | LQYFK | 368746 | LYEVM |
| 243786 | HCACI | 304236 | ARGFA | 344648 | PFKEQ | 368747 | ICSAR |
| 243806 | PSGFK | 304250 | MNLDR | 344655 | GSSGE | 368748 | FLIVG |
| 243810 | VESEK | 304257 | SILFN | 344658 | QSGGD | 368749 | RRRWT |
| 243878 | VKMDD | 304283 | KCTVF | 344659 | NQYIK | 368753 | NRNKQ |
| 243896 | AQGQQ | 304286 | EGTEV | 344666 | FFEEL | 368754 | KQANL |
| 243903 | AGEQA | 304290 | PDPFP | 344668 | TERNS | 368756 | SPPST |
| 243914 | NTMDK | 304292 | SASRS | 344674 | PGPGA | 368758 | DHALA |
| 243918 | PKSNV | 304308 | NDKKT | 344683 | MGTSL | 368759 | EMATF |
| 243919 | DDDDE | 304311 | CKFTD | 344689 | RFTPY | 368760 | SPPGT |
| 243924 | CFVPQ | 304321 | EEVKS | 344699 | SEEKA | 368761 | NSGQW |
| 243938 | EIPVP | 304327 | DDAED | 344729 | RNHTL | 368766 | RETDI |
| 243964 | ITIYS | 304331 | LTVTP | 344732 | PGHVD | 368767 | SLPAI |
| 243967 | MHADR | 304336 | LQRAA | 344737 | YCVLQ | 368769 | KIHPV |
| 243997 | KVKKE | 304350 | EDLYA | 344742 | ITDLR | 368770 | EITAH |
| 244007 | GDNRL | 304353 | RVTPK | 344758 | PQNIK | 368775 | VPAIS |
| 244020 | SSSRD | 304355 | SGSIR | 344759 | DLNEM | 368777 | LLPAA |
| 244040 | KRSCC | 304360 | VGPAL | 344777 | QKSYR | 368779 | DLEVN |
| 244043 | YRIRP | 304364 | GSDND | 344779 | RFDSQ | 368785 | DWSIS |
| 244047 | RAVSG | 304370 | IKLWD | 344781 | PSSKP | 368790 | LKSAK |
| 244050 | SGCPR | 304376 | SCCHH | 344782 | QHNLK | 368792 | SMETT |
| 244051 | TFPQY | 304401 | TCCVL | 344789 | DSPST | 368794 | LRLCT |
| 244061 | SIIDQ | 304408 | PVCFL | 344791 | VGKLD | 368797 | QQGSL |
| 244096 | FSYPE | 304410 | RQSQH | 344794 | DFHRA | 368798 | MVTAR |
| 244137 | FSGPK | 304414 | SMFQL | 344798 | DTFDS | 368799 | RVAPQ |
| 244174 | RSWTF | 304419 | QRKFP | 344801 | CPVSI | 368801 | RGDDQ |
| 244204 | SYTFS | 304422 | LISAL | 344811 | QHCSQ | 368805 | NNEDF |
| 244217 | ELEQA | 304429 | SEDKP | 344819 | QGDQQ | 368808 | PKAEQ |
| 244221 | PGEKY | 304440 | AFAEV | 344820 | QAPAC | 368809 | SVLAL |
| 244227 | LDFIA | 304447 | QAGAA | 344822 | KIRKK | 368810 | GRRIT |
| 244230 | HKLKL | 304467 | EPQVC | 344823 | TKSLE | 368813 | DLVLG |
| 244241 | LPRSV | 304495 | RRRWT | 344828 | KCGSL | 368814 | PQRPA |
| 244249 | VHLSY | 304500 | CKLAS | 344829 | EYLHL | 368818 | ALFAL |
| 244289 | CGGRH | 304501 | LGVGL | 344831 | RRQQY | 368824 | IETHV |
| 244314 | DSEEK | 304502 | VDLGS | 344832 | TEIAG | 368828 | WCICL |
| 244316 | GSSTR | 304507 | KGKRD | 344844 | LYATD | 368829 | ICEYH |
| 244321 | CTHSP | 304519 | LAWNC | 344847 | KSKEL | 368831 | AKAIA |
| 244333 | AGVLL | 304544 | RRLQD | 344851 | LSHCV | 368839 | GTTSS |
| 244336 | RVALI | 304553 | GRYFC | 344855 | GSSRR | 368856 | FDVQD |
| 244360 | VPAES | 304565 | SRRCC | 344860 | HVLYP | 368858 | LMTSD |
| 244426 | SERPL | 304583 | RLLNK | 344866 | CRSGE | 368859 | VDENC |
| 244458 | YVEAI | 304586 | KWRET | 344903 | FSAAS | 368868 | VTCEK |
| 244496 | PLSKE | 304590 | RTRVP | 344909 | HCCVQ | 368870 | SSVGL |
| 244513 | SQGAP | 304592 | SVREG | 344914 | KTEYT | 368872 | EESFV |
| 244519 | TEALY | 304593 | LKWTV | 344923 | SKDTL | 368876 | PFQLD |
| 244527 | QHTRL | 304595 | RPWLR | 344925 | GSLKP | 368880 | SWVSG |
| 244534 | APKKK | 304604 | AEKRQ | 344929 | DLKLG | 368881 | ISKLA |
| 244537 | QGRTL | 304642 | LLGGH | 344936 | CDIDI | 368884 | TSTAL |
| 244558 | TVYTL | 304643 | FKLIQ | 344937 | LSRNK | 368887 | IKTMQ |
| 244563 | ILTSA | 304656 | PGSSR | 344942 | YNGGQ | 368889 | NAQME |
| 244565 | LDEKL | 304668 | PLCIC | 344945 | NVLLK | 368891 | PSACL |
| 244571 | ALSQL | 304670 | HLQIY | 344961 | ESSEI | 368893 | IGTER |
| 244573 | APKKK | 304689 | KKHGM | 344967 | PDKPF | 368908 | KHYPY |
| 244576 | LHTKE | 304697 | LRGGC | 344976 | TSDIW | 368910 | IPAVP |
| 244601 | YTSAK | 304701 | QYSFY | 344984 | VKSRV | 368914 | YLEKL |
| 244620 | FSTYF | 304704 | FMDLK | 344989 | PLSHI | 368920 | PSFGS |
| 244623 | FLIKK | 304707 | RSYQY | 344996 | EEEPE | 368927 | DIDDI |
| 244625 | NIQWD | 304710 | RDMRN | 344998 | CPLGA | 368931 | IQRRV |
| 244636 | CGQLE | 304713 | EGHLQ | 345001 | RMDRL | 368933 | EKHRK |
| 244661 | RGERA | 304736 | TTKAE | 345014 | FPPGF | 368940 | EWHYL |
| 244669 | ADILK | 304743 | VSGQS | 345016 | IISRN | 368946 | KVLGL |
| 244709 | RSFVP | 304748 | KESKK | 345023 | DFGLC | 368948 | VGGGL |
| 244710 | RNCKS | 304750 | PEEIN | 345029 | ASEED | 368949 | SARSL |
| 244711 | SPAWK | 304762 | PKIHP | 345030 | GLAYS | 368951 | NETSL |
| 244728 | KGPNY | 304767 | GDTSL | 345031 | LCLKK | 368952 | LPNKA |
| 244741 | SKRKP | 304769 | PPLFF | 345040 | VAKDV | 368959 | EKKST |
| 244745 | LVFTY | 304782 | AQEDL | 345044 | EEAGQ | 368961 | SGRVE |
| 244751 | LHTHI | 304791 | MKKHR | 345055 | HVKLK | 368962 | RVGSC |
| 244759 | GRRPR | 304796 | LFSEK | 345064 | NCIIS | 368964 | LNTFC |
| 244763 | VGSDE | 304802 | GELWK | 345065 | KCVVS | 368965 | IFWKI |
| 244766 | TWLSF | 304803 | MPQAN | 345079 | LVHSE | 368966 | MLRCE |
| 244769 | SNVGK | 304807 | GAFSS | 345090 | LRPFF | 368976 | RPLPV |
| 244795 | HVTTV | 304811 | KGKND | 345096 | EKRLY | 368981 | LAQTV |
| 244799 | HEEWE | 304822 | TPPTA | 345102 | ALLWD | 368983 | FRLKK |
| 244820 | IRGMI | 304825 | SVTQA | 345107 | ESEGP | 368984 | KRAAN |
| 244869 | ELPQV | 304826 | RLQWE | 345125 | NEWVS | 368986 | SLNKQ |
| 244906 | GREGK | 304835 | RRRWT | 345133 | LESSP | 368987 | FSLNK |
| 244926 | KKCSV | 304843 | CCCKK | 345140 | DGGDM | 368989 | FYANQ |
| 244930 | NMKSN | 304846 | CDRSI | 345144 | GAFKN | 368990 | FFTST |
| 245046 | QTSIF | 304854 | SNLEK | 345147 | YGRTW | 368991 | SKHSF |
| 245074 | PQGRE | 304858 | GINKY | 345151 | SSEGK | 368996 | GQRQL |
| 245105 | PSHPR | 304875 | RTHNP | 345152 | KTKQP | 368999 | SKTLN |
| 245121 | EFESV | 304884 | GFSVS | 345153 | EMLLP | 369003 | VTTRL |
| 245157 | GTASS | 304891 | RKFFI | 345156 | SGKKA | 369014 | TRKFC |
| 245185 | CSCCA | 304895 | PEDRQ | 345161 | HSPDL | 369018 | SSSRI |
| 245206 | HQVTK | 304899 | KMWTS | 345162 | YLEHC | 369021 | RDHPG |
| 245222 | PGREP | 304903 | FDLYT | 345168 | KTVEE | 369034 | TCLTY |
| 245255 | RLYYL | 304908 | IAELK | 345179 | CPKLS | 369038 | YTNSH |
| 245304 | ACNIQ | 304915 | EGQFN | 345184 | TLAIH | 369042 | APGMN |
| 245312 | QPDEK | 304923 | FDLLS | 345192 | TEDDT | 369046 | KDGKC |
| 245323 | IYYKV | 304926 | LSGRS | 345193 | QLLDR | 369050 | MQLRS |
| 245407 | KSTAF | 304941 | CKAYS | 345195 | GSQPS | 369055 | IGTPS |
| 245414 | IPCAP | 304945 | PVDYS | 345200 | GRGQA | 369059 | CQLLN |
| 245441 | PPLRS | 304956 | VAALT | 345206 | ATVVS | 369061 | LGNKS |
| 245451 | GCGCR | 304965 | RCWQV | 345216 | QHSQW | 369062 | RFLGL |
| 245457 | KQADL | 304985 | EVGLP | 345217 | PRRRR | 369071 | EGRSQ |
| 245479 | QLTRP | 304997 | PENSS | 345223 | EFYVD | 369075 | LGHQS |
| 245503 | VISEE | 305005 | LAIGI | 345228 | QVSPH | 369076 | KLWKP |
| 245539 | HYRWW | 305011 | RVTFQ | 345229 | KTKDL | 369080 | ERKQR |
| 245541 | QWGNL | 305027 | QYNSL | 345230 | ELNCI | 369081 | AKDEL |
| 245543 | APRQR | 305039 | HEGDD | 345243 | EVKFQ | 369090 | AVHHE |
| 245544 | SLEGS | 305056 | CLLAG | 345259 | EIADE | 369091 | TEVTV |
| 245552 | AAQRE | 305059 | MKLSV | 345270 | DEAEV | 369095 | SRFLL |
| 245564 | DSLVD | 305069 | QPSRT | 345279 | GEARR | 369099 | RAFHC |
| 245615 | KLREE | 305071 | PADPE | 345280 | SCQLL | 369108 | KFSPY |
| 245649 | KLRAG | 305077 | WRKTL | 345281 | FLRRL | 369112 | SSDSD |
| 245663 | FAWLS | 305089 | YEERT | 345282 | LEKYA | 369119 | LSPAE |
| 245680 | EDGAS | 305096 | RKGPD | 345294 | CLACV | 369121 | GPVCC |
| 245796 | NRNQL | 305097 | ITMNP | 345317 | FALPL | 369123 | DPALF |
| 245810 | CGCGG | 305107 | IGILQ | 345328 | YVEKN | 369126 | NVKDN |
| 245811 | FSLKE | 305119 | CLVVR | 345333 | YGPKP | 369127 | QCQTS |
| 245812 | PPPAC | 305133 | PVKAK | 345340 | TPKKD | 369129 | SSIGH |
| 245816 | VPAST | 305135 | SLQAY | 345341 | ASPAH | 369130 | RQRSK |
| 245817 | SPRSE | 305151 | AGSRH | 345342 | VCMPV | 369131 | RPASP |
| 245903 | QWVRP | 305161 | RSPDS | 345344 | SYPTV | 369135 | EETDL |
| 245907 | FGCPN | 305182 | SQILS | 345359 | EDTHL | 369136 | YTAPC |
| 245908 | LEPDR | 305193 | APSLF | 345364 | FNIVS | 369139 | CSCCA |
| 245912 | GAFMV | 305198 | GLPEC | 345368 | KCHVM | 369144 | CSCCA |
| 245919 | SLLAL | 305200 | SSVIW | 345370 | LPESL | 369146 | CSCCA |
| 245923 | KAKAE | 305203 | DEKPF | 345374 | YPQQV | 369147 | KHWTQ |
| 245925 | QWRVV | 305204 | QTPES | 345393 | PASCS | 369150 | ARGKN |
| 245932 | KRGSP | 305207 | KRISS | 345395 | QPIWQ | 369154 | ISSVS |
| 245934 | AKGNS | 305221 | KGKRD | 345405 | EEAAR | 369157 | GSQKL |
| 245983 | SSNKV | 305223 | PSVSN | 345412 | RDRHH | 369159 | RNCIP |
| 246000 | EHDGT | 305230 | TMETE | 345420 | EEGGS | 369161 | DLKKQ |
| 246006 | PGTDC | 305244 | ALPSA | 345431 | PAMRF | 369164 | PVWPA |
| 246012 | KCEDA | 305255 | VWPTN | 345433 | PGLSY | 369165 | SLLLY |
| 246020 | GRNLR | 305259 | LKINK | 345436 | DAMLE | 369176 | PDQHH |
| 246024 | ADKGL | 305260 | LKIWN | 345445 | GIRFL | 369179 | LGQDL |
| 246027 | DDFYD | 305263 | QRVPF | 345449 | PGVLT | 369193 | THLKS |
| 246032 | VTCAA | 305270 | SQLLS | 345456 | VPDTW | 369198 | FIEQM |
| 246039 | PKRDS | 305286 | RARLS | 345464 | KVDWG | 369199 | LTWWL |
| 246041 | AAWPR | 305288 | STTRV | 345466 | IMQKN | 369210 | QFWAY |
| 246043 | EGTSV | 305297 | KGQPH | 345468 | HETIV | 369213 | AEMSK |
| 246062 | IEDKN | 305302 | GDLKY | 345469 | TLLTR | 369217 | EYIED |
| 246069 | EGCPV | 305343 | HATAM | 345470 | EYFFT | 369218 | LAEQV |
| 246070 | YKHMG | 305347 | PLDPP | 345471 | FSSAK | 369219 | GKWYP |
| 246071 | TYAKK | 305355 | PEVKS | 345477 | VYRGN | 369229 | IHACS |
| 246077 | LQLFP | 305372 | NDSLL | 345478 | EGNEH | 369238 | QSSSN |
| 246080 | RGPRR | 305373 | GHKHT | 345479 | RRKAL | 369239 | TQPWS |
| 246081 | DFFCE | 305403 | KLVYK | 345487 | RFGRR | 369241 | SLWGF |
| 246090 | CACFL | 305416 | VNSSS | 345491 | GFNIQ | 369250 | RNDLD |
| 246100 | PAAEG | 305422 | SSGHC | 345492 | QYTPL | 369251 | SLEKL |
| 246104 | AGPAS | 305424 | VVFSV | 345494 | KSGVW | 369252 | PEYYC |
| 246105 | EAEEQ | 305426 | KLACE | 345511 | WKSLQ | 369256 | SQYNV |
| 246108 | QAESF | 305430 | MRRLT | 345528 | INDAS | 369257 | DDLEA |
| 246115 | SVRSI | 305441 | GHGKF | 345530 | FDGVD | 369263 | LGKTD |
| 246117 | KAKTQ | 305442 | RSVNY | 345532 | ESTAC | 369268 | PPGPE |
| 246139 | FPSSC | 305449 | RNPGV | 345555 | GASSG | 369274 | GCQMQ |
| 246149 | QSPSM | 305459 | PSVGP | 345563 | AASCL | 369277 | EENQY |
| 246151 | THFIS | 305464 | GPSLD | 345571 | TPLDF | 369279 | FKTDH |
| 246166 | EPATD | 305465 | VKEEL | 345575 | ASLHG | 369280 | AVSLF |
| 246174 | LILKL | 305469 | KISSL | 345599 | TAIRS | 369291 | SSKGA |
| 246186 | VQEWV | 305480 | FKRGK | 345621 | WMGGQ | 369292 | DIEIV |
| 246190 | IMNNN | 305483 | LLPQQ | 345629 | TKDKA | 369293 | SRRTI |
| 246194 | DGALQ | 305494 | NVEGI | 345633 | QGMSQ | 369297 | CTAAG |
| 246222 | IGGKG | 305502 | GMIPS | 345637 | SGLTK | 369299 | CPPSS |
| 246229 | HQAFQ | 305503 | RITFD | 345652 | LGARV | 369312 | CSHHL |
| 246337 | LLRQN | 305520 | SWGSS | 345656 | GKFIL | 369313 | AVCHR |
| 246421 | MLPAS | 305524 | WASLQ | 345659 | ASFRA | 369316 | FVALG |
| 246505 | LSTVC | 305529 | WKQKT | 345667 | RSVVI | 369317 | KSYKH |
| 246515 | CNSEL | 305530 | RFHRP | 345681 | VTAMG | 369318 | RCLVM |
| 246529 | EPVGP | 305533 | GYPFK | 345689 | QCCSN | 369320 | VSKCA |
| 246532 | GVCWA | 305538 | YSSLT | 345691 | RAHLS | 369321 | CLLPH |
| 246533 | LTMYS | 305556 | GMGCS | 345702 | IIRVS | 369322 | AVWAP |
| 246535 | ELLFK | 305590 | SPYPY | 345703 | CDVSS | 369323 | CSEER |
| 246538 | ACAEN | 305595 | AHLKC | 345708 | PDSLS | 369325 | ALTGK |
| 246548 | VIALD | 305596 | ETKSI | 345716 | EKDDK | 369335 | LFLVF |
| 246549 | DFTTE | 305603 | AAWFT | 345719 | YYYDD | 369336 | IAKLS |
| 246551 | MPGRG | 305613 | GRVHF | 345721 | TTNED | 369339 | VLMTF |
| 246553 | GKSQK | 305627 | MRHPK | 345729 | LFFFG | 369341 | IKSSS |
| 246635 | DVRRP | 305631 | AGGLF | 345731 | AKEKL | 369344 | CESAF |
| 246646 | TGSRF | 305632 | LGTDN | 345752 | VQTVV | 369345 | RQAPN |
| 246657 | TTFSP | 305638 | RVLHA | 345765 | HGARR | 369346 | NPRAV |
| 246662 | KSSHS | 305640 | KWKGK | 345767 | VQKEN | 369349 | SCRKC |
| 246672 | RVDAQ | 305647 | SGPGN | 345771 | GEAAV | 369350 | PSTVR |
| 246747 | IFTAD | 305648 | SCKIS | 345774 | SSKQR | 369358 | QHPSL |
| 246785 | NLPLD | 305651 | SKRSP | 345783 | AWATW | 369360 | VVFHL |
| 246789 | DYRMR | 305653 | AEVKS | 345785 | NPTHL | 369371 | ESVTR |
| 246792 | PCVLL | 305654 | DDQTS | 345789 | NRRRR | 369372 | TDPST |
| 246794 | LRRPH | 305661 | RLEDE | 345796 | HSRLG | 369374 | PPLLP |
| 246798 | HSRCG | 305675 | VHQTS | 345797 | CKKER | 369380 | KCFEN |
| 246801 | SAPEQ | 305682 | GTVSE | 345806 | SLPSS | 369386 | LKAGS |
| 246802 | REIQL | 305687 | GMLPP | 345808 | SIFGR | 369390 | SNSKH |
| 246841 | DYSYT | 305692 | LVSWC | 345809 | EIQKI | 369395 | LCEEN |
| 246868 | DEKFE | 305696 | GASRE | 345834 | ELNTK | 369399 | AEHRP |
| 246891 | VMLQW | 305699 | PATAR | 345841 | PLPWD | 369400 | SQSST |
| 246895 | QQYTF | 305702 | YLQED | 345848 | EGEDD | 369402 | STSGN |
| 246896 | YLYDN | 305711 | LLIDT | 345849 | RIGFF | 369405 | VLFIC |
| 246911 | TSESG | 305714 | LHSRK | 345853 | ELAPT | 369409 | LITCV |
| 246912 | KNQLY | 305721 | NKHGC | 345856 | FSLKF | 369411 | EGMMF |
| 246914 | DVGRM | 305725 | YLKLE | 345868 | AGGYP | 369418 | TLAQS |
| 246949 | EVMLK | 305731 | RCQES | 345869 | CGPVP | 369419 | RNSKH |
| 246957 | ALERH | 305764 | KESHS | 345873 | VETKF | 369421 | LVFKD |
| 247001 | RRPYY | 305766 | SRLEQ | 345874 | LVSLV | 369423 | ILNLL |
| 247003 | SQGLV | 305769 | ISSVS | 345886 | LSDID | 369424 | EGQGS |
| 247005 | ECGCR | 305777 | AQRHK | 345895 | EKKDA | 369431 | IKKPA |
| 247020 | HHAEL | 305785 | TRVSQ | 345900 | HSTGR | 369432 | ISSCC |
| 247026 | EKEDD | 305790 | TRYAF | 345917 | VKLVK | 369434 | HSAMT |
| 247029 | NVDHS | 305810 | DWYDS | 345920 | KLWFL | 369437 | MFSLH |
| 247087 | TVTSL | 305824 | NCTAK | 345924 | GKKLR | 369441 | FRLRK |
| 247138 | KVKGS | 305826 | SIAQE | 345964 | TYVNV | 369442 | RRSYK |
| 247153 | EEEEL | 305839 | GPTAE | 345972 | QSWSP | 369445 | QKSSC |
| 247170 | TKLNF | 305847 | PKIHP | 345980 | LLGSL | 369449 | SLTSP |
| 247178 | YTGHR | 305852 | GGGPV | 345984 | QVVPL | 369456 | GSLAA |
| 247182 | VDLGS | 305859 | TGCFC | 345985 | MESTV | 369458 | YSLGV |
| 247194 | GFLLK | 305873 | SDRLQ | 345988 | FLLRL | 369459 | RLRTR |
| 247207 | IEEVD | 305875 | VMKDL | 346001 | KEEGA | 369461 | RKSKL |
| 247219 | GFKKA | 305877 | ETDPS | 346012 | QVIQF | 369465 | IESVD |
| 247225 | FIGIS | 305892 | FTSCG | 346015 | CVLVA | 369473 | CHHGY |
| 247226 | LNSVG | 305896 | KLYKL | 346017 | RDLQA | 369477 | SPAGR |
| 247270 | NKQIG | 305899 | LRLNA | 346022 | QQADE | 369488 | KWRLQ |
| 247271 | VMLAV | 305906 | RDPCQ | 346027 | YEFMA | 369490 | RGPGK |
| 247306 | SAPHI | 305913 | LLCPT | 346032 | CGGDD | 369491 | GSGPG |
| 247461 | KPRRE | 305918 | SSDSE | 346037 | FGLFD | 369492 | SLGLG |
| 247470 | DLERS | 305919 | PETIN | 346039 | AGSIA | 369494 | NSVSI |
| 247523 | SNNSF | 305924 | RKSNP | 346045 | PRGPV | 369497 | TKKYI |
| 247550 | LKSHL | 305954 | AFKGM | 346046 | PRGPV | 369500 | LQEEN |
| 247584 | VPPNA | 305969 | MKNNL | 346048 | RRRLS | 369504 | GSGPG |
| 247618 | KKRSN | 305970 | HRPLH | 346050 | VQESV | 369508 | PASPA |
| 247655 | QLLKT | 305973 | DITRL | 346051 | AEHVK | 369512 | HCVRF |
| 247706 | PEDKK | 305974 | LKTKL | 346063 | IRQLN | 369513 | SKIYV |
| 247712 | DTRAD | 305975 | SEPTC | 346065 | EVMEI | 369514 | IPAAL |
| 247815 | DNQET | 305976 | YVLVN | 346067 | TTDWS | 369516 | DCGPS |
| 247829 | QIGNK | 305988 | HKTEA | 346080 | SESED | 369518 | KAKTS |
| 247843 | QAKDI | 305995 | ALSNM | 346085 | TPPCT | 369519 | LLPRH |
| 247866 | PDDED | 305999 | RRRWT | 346088 | EEDED | 369529 | MTMSV |
| 247879 | GPIFS | 306003 | DSILK | 346090 | SLYSL | 369530 | NSVSI |
| 247881 | LCFKK | 306010 | ELSKR | 346103 | LPHYF | 369531 | DLLSA |
| 247883 | RCWGP | 306015 | WRRQT | 346112 | ITIYS | 369538 | IYGED |
| 247930 | THTGE | 306070 | MKGID | 346114 | QQPPR | 369542 | SKRRK |
| 247933 | SPGNP | 306080 | DRSYH | 346120 | KAFGQ | 369544 | PTQTH |
| 247956 | WKRLQ | 306088 | GRVQD | 346123 | PLSLP | 369545 | LKIQN |
| 247970 | ILRTE | 306095 | YSSGT | 346127 | SPCWF | 369547 | KKISQ |
| 247977 | MDWWM | 306099 | FFPQQ | 346128 | QSEST | 369553 | LKSKE |
| 247986 | GSEPL | 306100 | APSSS | 346130 | RWTVS | 369554 | LRSKE |
| 247992 | HKPWC | 306105 | HAPTC | 346142 | LFYDV | 369556 | LRRKE |
| 248041 | GANSQ | 306106 | EKKHK | 346144 | LPPAP | 369558 | LRRKE |
| 248058 | FRGKQ | 306117 | EKIAN | 346146 | LGCCL | 369559 | HKSQA |
| 248069 | NRYDV | 306123 | GVSET | 346147 | RSCLL | 369560 | LRRKE |
| 248071 | MKRHM | 306124 | EDLMP | 346148 | KILAQ | 369562 | LRRKD |
| 248073 | TAGLS | 306129 | PNGFH | 346151 | SAASR | 369564 | LRRKD |
| 248076 | SSLLQ | 306138 | SSSSL | 346152 | SILIH | 369566 | LRRKD |
| 248089 | DIMEL | 306157 | FYQNQ | 346155 | VAYTG | 369568 | PHSRA |
| 248098 | SISFY | 306160 | LNLTL | 346160 | QENSS | 369571 | LRRKD |
| 248114 | DGSCD | 306163 | PVPAQ | 346167 | FWDPE | 369573 | GQSRA |
| 248121 | QVPAY | 306178 | ISIFQ | 346173 | EIGRI | 369574 | LRRKE |
| 248125 | ARIIT | 306185 | KELTA | 346191 | GQVGG | 369578 | DLGSS |
| 248139 | NCKIS | 306187 | CGKAF | 346193 | HVLQK | 369579 | PQPPE |
| 248142 | LCEYS | 306190 | TLPES | 346196 | ESPRH | 369580 | PEASV |
| 248150 | KCTIL | 306220 | ESLRR | 346203 | GISPS | 369581 | GYLRN |
| 248151 | EGGGV | 306223 | TPRGG | 346204 | KKKPP | 369589 | YRAQS |
| 248211 | RENAY | 306241 | RLSHF | 346206 | ADAPE | 369592 | FKGPL |
| 248228 | CFRDE | 306245 | TLLAL | 346228 | SCCLA | 369593 | RTHIP |
| 248244 | TQEAE | 306275 | RRSSV | 346229 | SAESE | 369597 | QSFQG |
| 248248 | LFTGL | 306276 | APNEC | 346236 | RYKVL | 369606 | QSFQG |
| 248272 | RVHSP | 306296 | KNPKK | 346240 | VWVEP | 369607 | SGTSL |
| 248306 | LKKQQ | 306299 | EEAEG | 346250 | DDWES | 369611 | ASSLR |
| 248342 | MASSQ | 306306 | ERMKH | 346251 | FVIKV | 369614 | GGVWR |
| 248378 | MVHVY | 306320 | PKTPS | 346253 | LFHYR | 369620 | HPRLF |
| 248384 | NPFLL | 306328 | EDRTQ | 346255 | AEYTD | 369622 | RWYIH |
| 248419 | LSRKD | 306330 | GEGNN | 346256 | GHRVS | 369625 | KYTIR |
| 248437 | DEGEE | 306335 | SLQGI | 346265 | LLPAP | 369626 | GPTQI |
| 248444 | EKGLF | 306340 | MEHQH | 346269 | RKATR | 369634 | LDDHQ |
| 248450 | QRPDR | 306344 | PTEFS | 346272 | KASSQ | 369636 | TDIWD |
| 248550 | WKIKS | 306356 | KHLPS | 346277 | DRVSF | 369638 | AKAIS |
| 248553 | ETAAK | 306361 | PLVTQ | 346283 | PRHAR | 369639 | CPGCS |
| 248564 | SCVIS | 306382 | EVAVP | 346291 | TETNA | 369643 | HERYV |
| 248566 | KMETS | 306386 | MPEGG | 346294 | QPRKK | 369645 | FKKAY |
| 248572 | GCVIS | 306390 | LGGQK | 346298 | ADPVA | 369648 | TSPVV |
| 248594 | PSEWT | 306396 | SMLLQ | 346300 | PDENE | 369649 | MEEVD |
| 248598 | KHFKP | 306397 | MVIVG | 346305 | DSVLF | 369658 | FPEKF |
| 248633 | KVTLA | 306407 | RPQED | 346306 | NVQDT | 369673 | GEKAQ |
| 248643 | LSRFA | 306410 | KARYT | 346310 | RDDQL | 369677 | ELEHA |
| 248668 | LESTV | 306425 | GNMPY | 346313 | SPPLS | 369681 | GSDKL |
| 248673 | ISVSE | 306446 | IQIHH | 346316 | YGFGG | 369682 | QRRDS |
| 248701 | RNGPC | 306449 | VGTHC | 346317 | VVSPR | 369687 | LVQAP |
| 248706 | TVTSV | 306459 | PIEDY | 346324 | TDEDD | 369689 | MLAQE |
| 248846 | YYQDA | 306461 | KTKQK | 346325 | ATPEA | 369690 | LSAAW |
| 248879 | SPVPP | 306469 | HRKCF | 346335 | LLLED | 369695 | TSGTS |
| 248901 | IASKQ | 306472 | ADQST | 346340 | AFLEN | 369696 | WRLQA |
| 248903 | LGVPI | 306473 | GTFLF | 346342 | PGEAK | 369699 | RLTPL |
| 248923 | EPAGY | 306482 | KGVDV | 346345 | HRGGH | 369703 | GEDEA |
| 248924 | HGALP | 306490 | PSRQC | 346348 | NTHLI | 369714 | CLYLH |
| 248933 | YEVSI | 306496 | MTCWC | 346363 | WFGMQ | 369716 | ICIDD |
| 248935 | LAMIR | 306497 | RESAI | 346371 | CPTPH | 369719 | RKAKT |
| 248958 | GHDEL | 306523 | LRPGC | 346378 | LLHMP | 369724 | HGTGK |
| 248975 | AGEGN | 306524 | KMEEE | 346388 | NLLTL | 369727 | KDQTH |
| 248983 | PGEAK | 306535 | LHIAT | 346401 | KRRPD | 369728 | VFTKK |
| 248984 | IFSES | 306548 | EDYRL | 346402 | LRVIS | 369729 | CQWKI |
| 248992 | SSCPK | 306549 | HPNYN | 346403 | SIGRD | 369730 | FSFFN |
| 248996 | YIGLC | 306561 | SLLAL | 346408 | FENVI | 369731 | CQRKI |
| 249007 | PGEAK | 306565 | LAVSD | 346412 | DDLDI | 369733 | LYVHI |
| 249014 | DEVKV | 306574 | FDSQP | 346415 | DHKDH | 369736 | VKLEA |
| 249016 | ESKGT | 306596 | DLLSS | 346417 | ARAQT | 369738 | RGRWD |
| 249041 | ARGPE | 306598 | ELVPQ | 346437 | DDETI | 369739 | EDFLQ |
| 249042 | KSEKA | 306606 | TVLTF | 346442 | GPPPV | 369742 | CGNIP |
| 249044 | GRHRQ | 306607 | MSKRS | 346450 | APGED | 369744 | LLLTK |
| 249062 | EPAGY | 306614 | QCGEM | 346453 | VLGLS | 369747 | CGKVF |
| 249064 | EEMEL | 306625 | PASKR | 346466 | LAHKA | 369750 | QSFIL |
| 249066 | PGQDQ | 306627 | KVRKE | 346467 | DSDLE | 369751 | HCLKL |
| 249071 | ACSLL | 306637 | SRSSG | 346483 | AQAPA | 369755 | ALLLL |
| 249075 | LAQAF | 306651 | SENKG | 346490 | DEAYD | 369757 | ESSQK |
| 249079 | GLATT | 306654 | LKLAL | 346500 | HQKAL | 369762 | RDLKT |
| 249116 | QNQGN | 306657 | IGFIF | 346508 | RLKPT | 369770 | RAHLS |
| 249122 | AHFNH | 306662 | APGQF | 346509 | APGED | 369774 | WRKTL |
| 249269 | CWLRD | 306670 | LPASS | 346510 | NSALT | 369775 | TEAVG |
| 249284 | LKGKC | 306678 | AEMEI | 346511 | PVCFL | 369777 | AAGRR |
| 249289 | AEDLR | 306682 | TVCVC | 346517 | AGQEM | 369778 | WKETL |
| 249299 | NSVAH | 306688 | KRKLI | 346530 | GEAQV | 369781 | TEAVG |
| 249330 | LLRRP | 306697 | SQLQS | 346534 | RESKC | 369782 | RAHLS |
| 249344 | LLQNH | 306705 | FSFFF | 346536 | LLGNP | 369785 | SKIGN |
| 249356 | DCSGQ | 306707 | YLFPL | 346537 | PRKQG | 369790 | RAHLS |
| 249363 | QETQI | 306726 | ISIDF | 346542 | STDYV | 369796 | SNLGS |
| 249364 | RHDEF | 306734 | TRYMT | 346543 | QADHW | 369798 | IGRKK |
| 249373 | ADSDF | 306752 | RERQK | 346550 | CGGED | 369802 | GAPLI |
| 249389 | QVGPN | 306754 | AFFHN | 346560 | LLLPH | 369810 | QAQKK |
| 249399 | PRLLP | 306760 | LSPPK | 346564 | KGWCV | 369816 | TDASH |
| 249440 | KLTHL | 306761 | EIQRV | 346566 | KSSRK | 369820 | ISETR |
| 249442 | KGRLS | 306772 | PQASQ | 346567 | AIRSY | 369823 | SVSPS |
| 249480 | RAKAN | 306776 | TLKHH | 346572 | RRRLS | 369833 | KLAGK |
| 249499 | CPKGD | 306780 | HLAQN | 346575 | VKVSY | 369834 | QVFYE |
| 249501 | NLTFS | 306788 | EKKNE | 346577 | IDSIF | 369835 | SRFWR |
| 249504 | GNPLF | 306791 | LPNDS | 346586 | RGHCG | 369837 | FLLYQ |
| 249598 | ECGCR | 306807 | SVAVH | 346587 | GKIRD | 369840 | NKKKK |
| 249601 | ARAPK | 306816 | DVSCV | 346598 | TTDWS | 369841 | ATCES |
| 249636 | IISLD | 306817 | PLTLF | 346599 | TAQNG | 369843 | VVSKM |
| 249647 | KLIDS | 306822 | DSMIS | 346600 | KASQD | 369849 | PNQFI |
| 249651 | RSKME | 306844 | EESSV | 346601 | AGPRK | 369853 | VEPCT |
| 249700 | EADRR | 306852 | PPALR | 346603 | AHPAP | 369855 | FLLHL |
| 249749 | IATEV | 306864 | AKPYI | 346608 | FKRCS | 369857 | RSPTF |
| 249750 | PQKNS | 306866 | SVYGL | 346610 | SEWEL | 369858 | LLLIP |
| 249760 | NADFH | 306881 | VSSAA | 346611 | RRNIF | 369860 | YLLYS |
| 249776 | QLLEM | 306884 | ERKNF | 346625 | CAVPR | 369862 | KPILF |
| 249798 | ALALV | 306887 | GKEIH | 346627 | SKNSE | 369863 | CQAQD |
| 249806 | VSSRH | 306888 | HVGRN | 346634 | QPTTE | 369864 | WSPQL |
| 249822 | SKLAG | 306894 | EGFAY | 346643 | AQKEN | 369866 | ATTGI |
| 249842 | FLTSF | 306900 | WLTVK | 346647 | AIHQR | 369870 | AQGLE |
| 249861 | KEETC | 306906 | GAMYT | 346652 | KILYE | 369871 | SDLTR |
| 249883 | VEILI | 306915 | AESKL | 346654 | KQKGL | 369873 | LPSES |
| 249887 | STFSI | 306919 | VASTV | 346659 | VVGWN | 369879 | FSEEY |
| 249910 | KLSLS | 306920 | WLDHV | 346666 | ASQSA | 369887 | PPRRF |
| 249923 | KKTSI | 306932 | AETVA | 346667 | PPGPK | 369893 | TSTYS |
| 250003 | IYQVL | 306939 | QEKHY | 346675 | HFVMC | 369895 | IPLKF |
| 250024 | TEDVH | 306940 | QSGDL | 346691 | FPPGF | 369897 | NGSFQ |
| 250056 | VYASP | 306965 | EANSP | 346693 | NKKAQ | 369899 | SLLMR |
| 250066 | YSMLQ | 306968 | FEMQA | 346695 | ASRFW | 369907 | LEVLA |
| 250076 | KEPSH | 306983 | LNEDQ | 346697 | GAGPR | 369915 | INPKV |
| 250092 | AYQAL | 306991 | MVLDV | 346716 | ALQVF | 369927 | YSDEY |
| 250101 | LFSED | 306997 | ESEDL | 346720 | RGSQC | 369932 | TCGKA |
| 250111 | RINKT | 306999 | YNFNS | 346733 | HLEES | 369943 | SSDEF |
| 250113 | PHRPN | 307004 | FMKRK | 346762 | FGYSR | 369962 | NTTVV |
| 250156 | RQNEG | 307006 | VQPYL | 346774 | VGPLI | 369964 | AAGGK |
| 250160 | SEIAN | 307014 | KKTMR | 346785 | KKLGK | 369965 | KNEAN |
| 250173 | VPPLI | 307023 | MPASA | 346789 | KVFMY | 369967 | TACVC |
| 250237 | GITLG | 307031 | CSPSS | 346791 | SCSSR | 369968 | EDDRD |
| 250244 | QLRTS | 307040 | ISSLC | 346793 | ELKDQ | 369970 | KFDLS |
| 250263 | PHFRK | 307041 | PSHLQ | 346796 | MSNFS | 369972 | SPPKV |
| 250340 | CEFPF | 307046 | KEFYA | 346797 | QPGAS | 369975 | AASPW |
| 250351 | SCQPF | 307052 | FLVKS | 346800 | SRLLV | 369976 | LSVDD |
| 250360 | IKIHR | 307060 | RPSVG | 346801 | THSHT | 369979 | RGQKD |
| 250366 | EIMEN | 307065 | SLSLM | 346802 | FGFNF | 369981 | VALPH |
| 250373 | EEPPA | 307071 | EAKKT | 346805 | RRIQQ | 369986 | VPLAL |
| 250377 | LHQKT | 307077 | FKFPG | 346808 | DRPDF | 369989 | EFGSA |
| 250378 | ILQAN | 307078 | GGKQV | 346809 | LCNFM | 369996 | IKGEK |
| 250405 | FFASK | 307080 | PPTPT | 346816 | ELPSQ | 370000 | PWKCV |
| 250416 | FLQLW | 307087 | YETDL | 346821 | TLEYS | 370007 | QAGES |
| 250448 | VLNTS | 307093 | IESSP | 346823 | SKFGS | 370013 | SLLAE |
| 250454 | LASHS | 307096 | VHFDG | 346825 | FLRPR | 370014 | QFSND |
| 250479 | GTETV | 307109 | KRYAT | 346827 | VESAF | 370021 | MKDIR |
| 250495 | GGLRQ | 307125 | GLGPA | 346829 | AASGI | 370023 | KKFYQ |
| 250498 | MNFVG | 307126 | AKDGL | 346837 | FTMGR | 370034 | FKETV |
| 250515 | KRRQC | 307129 | AKARK | 346839 | EDSRE | 370047 | FTSVD |
| 250524 | KHCSH | 307130 | CPLSS | 346843 | PDPLT | 370049 | DGTEV |
| 250535 | SLENN | 307132 | KCRKV | 346849 | RLYHL | 370055 | CCVIL |
| 250559 | SCQLL | 307134 | PDSWV | 346850 | HVFKS | 370056 | WRPKI |
| 250615 | RNSGC | 307142 | MPFYQ | 346860 | QTTRS | 370058 | AACVD |
| 250617 | TSILP | 307143 | YNWRS | 346874 | STMRY | 370063 | AGDAK |
| 250693 | GPGLL | 307155 | DSSRY | 346879 | YGRTW | 370070 | AGRPV |
| 250699 | LVQAL | 307156 | YNTCQ | 346886 | TEKDN | 370074 | RFSSP |
| 250776 | GVSRM | 307159 | RKIFS | 346890 | HKIVK | 370075 | GVDLL |
| 250784 | KQSSG | 307164 | CNEDL | 346892 | FCCWI | 370077 | TQIGL |
| 250805 | GVSRM | 307181 | PYGYY | 346901 | FLIFL | 370081 | YKSWS |
| 250823 | TPLSP | 307183 | DRRSR | 346902 | KNASC | 370083 | SHSLN |
| 250825 | TPLSP | 307184 | PGRGS | 346913 | KPARR | 370085 | CQGPL |
| 250831 | DSSRY | 307197 | TKRNC | 346918 | FIGVG | 370087 | TARAR |
| 250838 | KIDEF | 307199 | PPPSS | 346921 | LVMFI | 370088 | REEVD |
| 250863 | MLKSV | 307202 | LSSFR | 346927 | MEKDI | 370096 | FMTNQ |
| 250894 | SYTPE | 307206 | VIQNN | 346931 | LEILF | 370097 | PCLCL |
| 250896 | VGDHA | 307208 | QSTAS | 346936 | DLDLN | 370098 | VLAAL |
| 250916 | APAGL | 307214 | LSAGQ | 346937 | KEAPH | 370103 | LGLLA |
| 250930 | LYAVT | 307218 | RFFTI | 346942 | PNTQD | 370107 | AGRPV |
| 250937 | RGAPS | 307234 | SDDYM | 346955 | GRKSP | 370109 | STLDN |
| 250974 | PSQRA | 307235 | PLPSN | 346956 | SLFVD | 370113 | QDKVN |
| 251020 | EIVTS | 307241 | KTLNI | 346958 | EKIHF | 370115 | RFSSP |
| 251038 | PQTSE | 307252 | FQQGT | 346959 | RTVSK | 370119 | SHSLN |
| 251047 | AKKFF | 307258 | RVKSC | 346962 | LLSTS | 370125 | SFYIL |
| 251071 | LLYQD | 307259 | EETPM | 346964 | TCGAK | 370126 | FCCWI |
| 251074 | WVTEV | 307260 | GALKK | 346970 | LMGWE | 370128 | LDQCK |
| 251076 | ILDIL | 307264 | ADSEM | 346981 | IVKTT | 370129 | FSDEY |
| 251089 | EVTAP | 307265 | KERDP | 346984 | NSRGL | 370135 | AGRPV |
| 251102 | EEKAE | 307272 | EKRVR | 346986 | NSFMV | 370136 | PGAVS |
| 251108 | RLGIH | 307275 | AFRAP | 346987 | PPIGN | 370137 | NPLLE |
| 251119 | PGSRK | 307280 | HIMSI | 346990 | TCNRH | 370142 | RAHLS |
| 251127 | DLLDI | 307288 | RITFV | 346992 | TEKYR | 370150 | KQRRC |
| 251143 | LQTRT | 307292 | MESVA | 346997 | RGYLN | 370151 | ESDGT |
| 251152 | RRSAA | 307297 | EACQQ | 347003 | LFLIY | 370152 | FHLLG |
| 251166 | EDEWD | 307298 | FVGFH | 347005 | EAGEI | 370155 | YLRAS |
| 251170 | SLVSR | 307304 | NENDE | 347008 | ISYRQ | 370161 | QQMIA |
| 251181 | ERFLI | 307305 | LIEEC | 347009 | RQQNF | 370166 | NQSAK |
| 251203 | SSTSN | 307321 | NFNFT | 347011 | PGQSQ | 370191 | PGTFN |
| 251241 | RKETG | 307340 | KTKQK | 347017 | AIHSY | 370192 | SDRAC |
| 251250 | GKLTH | 307342 | FASNL | 347032 | TNIFA | 370194 | TNPNA |
| 251268 | TSMSL | 307356 | RTRSC | 347038 | PQRSR | 370195 | TFMYS |
| 251269 | GRKAI | 307369 | HSKLH | 347040 | TGTQR | 370198 | FLKFF |
| 251272 | FLNDM | 307397 | FRGKQ | 347041 | SLIEI | 370201 | KDHNS |
| 251275 | LLNPT | 307423 | YRRLQ | 347043 | HILHS | 370210 | QVYAG |
| 251287 | LSSNL | 307432 | SVAKK | 347045 | FSNIK | 370213 | SIMFN |
| 251289 | TRPAK | 307443 | RSSVL | 347046 | QAKRN | 370215 | GFPSQ |
| 251296 | ILELT | 307445 | LNELN | 347047 | TKGEV | 370216 | VLCPP |
| 251303 | DLLET | 307447 | AHSTL | 347049 | LMARE | 370222 | KLGLL |
| 251312 | TEQVT | 307449 | TVGRD | 347050 | KSKTK | 370223 | QTKGS |
| 251334 | SVSGI | 307461 | CTMKS | 347051 | SEITE | 370224 | LYDDS |
| 251337 | DCGLF | 307477 | ALSVP | 347053 | QVPRK | 370227 | VHAIA |
| 251343 | LSLNF | 307481 | DAARQ | 347055 | HIMSG | 370228 | TDSIE |
| 251363 | HTTAT | 307491 | RQKST | 347056 | LASVG | 370231 | KPSSD |
| 251372 | SQRSL | 307508 | SEPPM | 347057 | CGVGS | 370238 | SSRLQ |
| 251377 | DAAGR | 307513 | NEQQE | 347060 | LANSS | 370242 | PADDV |
| 251390 | SKAGE | 307515 | IQPQT | 347064 | AAKKD | 370243 | WGPGV |
| 251412 | GTQEQ | 307519 | SKTGI | 347066 | CKKAI | 370251 | LQGRL |
| 251413 | GTQEQ | 307525 | ASMLT | 347068 | AGGCI | 370253 | SPAFW |
| 251472 | APPGP | 307540 | RCQEA | 347081 | LNSTF | 370254 | FSDEY |
| 251473 | PAVAT | 307549 | CRQIN | 347087 | DESWD | 370255 | YFWPS |
| 251496 | NEDLS | 307552 | SRNPL | 347088 | AENNS | 370256 | DCSKF |
| 251507 | KFVYL | 307567 | DPGKV | 347089 | LPRGC | 370258 | SQTAY |
| 251527 | PQAMT | 307598 | KNIIL | 347095 | AENEF | 370259 | NKEAV |
| 251535 | NSVTI | 307599 | KVHCD | 347096 | VPSDL | 370263 | CSRKL |
| 251566 | IEKRE | 307604 | PSTLL | 347102 | YEVIY | 370264 | WWQGL |
| 251582 | MLGKF | 307607 | QKKKL | 347106 | DHYAT | 370265 | QKTLL |
| 251595 | TSKYR | 307617 | TAGAN | 347117 | GTEVA | 370266 | QHKDE |
| 251607 | YIKKT | 307634 | VPTII | 347119 | PVVCQ | 370267 | APAVI |
| 251630 | TVEFS | 307640 | PRDSR | 347121 | NHESI | 370270 | LWLTM |
| 251636 | KTENN | 307650 | AGAGQ | 347127 | HLGRH | 370271 | CVPFK |
| 251642 | DLSLD | 307666 | DRPKR | 347134 | KETLV | 370273 | RVKWC |
| 251643 | IEELM | 307674 | GIEFI | 347140 | TGEVA | 370274 | HRHTH |
| 251648 | KGCCN | 307684 | KLLDG | 347150 | IKIIN | 370277 | LTRPL |
| 251654 | ANIPL | 307694 | HPQMY | 347152 | QGTCV | 370281 | RTRLT |
| 251675 | MSLDS | 307697 | WRSKL | 347155 | SEKLC | 370284 | HSGER |
| 251691 | YDIIV | 307701 | VRASW | 347156 | CASWQ | 370288 | VTUSS |
| 251722 | VGSFR | 307705 | AAKKK | 347161 | CYRDF | 370290 | IRERK |
| 251749 | HGKFL | 307713 | AGSRQ | 347164 | CGGDD | 370293 | FIPAL |
| 251757 | VLKET | 307720 | GGAWL | 347168 | YGFGG | 370294 | HKKAL |
| 251775 | CFSKM | 307722 | KTQGH | 347169 | FEIEL | 370297 | PGVSA |
| 251776 | RVWLE | 307726 | GREVG | 347170 | GTSAS | 370299 | PERGK |
| 251808 | TLMEI | 307734 | FWKGQ | 347178 | SNLTR | 370301 | PMKRK |
| 251809 | RQYEL | 307741 | SRTIQ | 347184 | KVTTC | 370303 | FANHV |
| 251810 | LDADF | 307746 | GQRRE | 347188 | RKTDD | 370310 | GGSCL |
| 251822 | SSAVV | 307751 | RLNEK | 347190 | AMDSI | 370313 | TVSNC |
| 251847 | HLTRL | 307759 | ELAHS | 347193 | GLTAL | 370314 | TTQTT |
| 251849 | RLPVF | 307766 | CREHT | 347197 | KTQAV | 370316 | THGDL |
| 251864 | GGKPL | 307774 | KKDPR | 347198 | KSCTM | 370318 | SDLIS |
| 251871 | SPCLL | 307786 | KATNE | 347205 | TDTLC | 370331 | RSRWL |
| 251900 | EGKYS | 307798 | DSDLE | 347206 | VLFWK | 370334 | HWLGE |
| 251921 | LNYIC | 307801 | NPVFD | 347211 | DQCCC | 370336 | FHHVG |
| 251959 | EGDES | 307803 | YSRWI | 347213 | LPSTI | 370337 | FVNLD |
| 251968 | LSDLY | 307805 | GCECC | 347216 | LLSQT | 370343 | SSIQE |
| 251973 | SSSEA | 307821 | ELVGL | 347222 | LIISY | 370345 | ANGQL |
| 252011 | KVQDP | 307822 | NSSEI | 347232 | SYAFS | 370356 | HFGAL |
| 252015 | DFTEE | 307831 | GTARS | 347234 | RIHTG | 370357 | RRNFN |
| 252032 | FELKP | 307833 | LGSSK | 347243 | DISNI | 370368 | ADAAR |
| 252037 | TAGES | 307843 | CKKDS | 347247 | VHSGE | 370372 | GLHAP |
| 252071 | SPPFH | 307852 | VPVNR | 347250 | IAKTQ | 370373 | LLNLE |
| 252087 | KKEKK | 307853 | YGPLT | 347254 | AARPV | 370374 | QVEDS |
| 252102 | LSGKA | 307854 | YYREK | 347269 | LQELE | 370375 | KYVLS |
| 252108 | KEQLE | 307858 | KGDVG | 347276 | SSAEE | 370376 | STGKN |
| 252115 | FKIKL | 307859 | KDKVR | 347277 | PLPSQ | 370377 | SWIIQ |
| 252134 | SLNWS | 307860 | QLSLT | 347280 | SPRKP | 370378 | HFSGS |
| 252136 | TFPSS | 307863 | RRDFW | 347287 | LSASS | 370388 | ETHLW |
| 252137 | ASDFF | 307870 | PPAHL | 347294 | ELEYL | 370391 | SELDN |
| 252172 | QKIEE | 307875 | PSVEI | 347298 | WAICP | 370394 | STSPS |
| 252173 | KISAE | 307879 | SGGPN | 347299 | LHIRS | 370395 | AEEHS |
| 252206 | ENLLM | 307885 | QPTEQ | 347301 | GTLLN | 370398 | SSTCL |
| 252207 | VAELV | 307889 | VEKKK | 347308 | NLLLL | 370400 | LPLLF |
| 252211 | NILSQ | 307900 | FQYKN | 347310 | RCQAA | 370408 | PTVTQ |
| 252229 | STEGT | 307908 | IIHTR | 347313 | WKTVW | 370414 | KVKKE |
| 252242 | KSFKS | 307911 | RKPRL | 347314 | KKKDK | 370415 | LRVLG |
| 252244 | SGVTR | 307928 | KIINI | 347318 | SLHGH | 370418 | QETFT |
| 252245 | KSYTH | 307933 | NVELT | 347321 | SAGSS | 370419 | VHLMQ |
| 252250 | KSYKH | 307940 | FLDKL | 347322 | AFSEL | 370420 | ELPSV |
| 252252 | KSYKH | 307951 | MKSPP | 347324 | DKAEL | 370421 | PQEPR |
| 252268 | NQNSS | 307954 | NHPRR | 347329 | NKLGV | 370424 | NSSVY |
| 252288 | LVTKG | 307958 | FSIKE | 347339 | LGHEV | 370430 | ENWFE |
| 252308 | NSKEG | 307971 | APTSR | 347345 | WWTSN | 370439 | CCWVG |
| 252318 | QTNSQ | 307973 | RRELK | 347358 | EGEGV | 370443 | TCQGH |
| 252321 | RETDL | 308012 | ARRRC | 347371 | ALDDD | 370445 | YLYDN |
| 252322 | SEGPV | 308021 | NFPIY | 347372 | TGTQR | 370446 | GQEGP |
| 252325 | RRKQH | 308022 | EKMLR | 347379 | DRQKT | 370453 | SNYSS |
| 252329 | LLTSS | 308024 | LNEEN | 347389 | YVQFT | 370460 | KKERR |
| 252338 | LTREE | 308057 | YEPEA | 347402 | PSRGA | 370461 | REGRN |
| 252444 | EDDVA | 308080 | LHIAT | 347408 | FQVRT | 370467 | LPSYE |
| 252445 | EAANQ | 308082 | QRPSP | 347409 | RCQLW | 370468 | PGLDP |
| 252453 | AALPA | 308083 | FKTMH | 347416 | TLAKC | 370469 | KIPQK |
| 252455 | DHDEL | 308107 | VAACI | 347418 | VKRNV | 370473 | SMQSK |
| 252456 | YYNSA | 308117 | CRTSV | 347427 | CIMNW | 370479 | ELPSV |
| 252463 | RETLY | 308137 | LWLLS | 347428 | FSVKM | 370480 | QISRD |
| 252482 | PRAQR | 308149 | DGEES | 347431 | SLSKC | 370483 | STTRV |
| 252483 | RAMYV | 308159 | NKVLS | 347433 | WNIRR | 370486 | KGKRD |
| 252486 | PSDNH | 308161 | EKKIQ | 347438 | APKTN | 370488 | EKPKK |
| 252487 | GLTIG | 308164 | PECSP | 347440 | LVQLC | 370493 | RPRAL |
| 252489 | DKDQG | 308165 | SKTIK | 347441 | YFHRK | 370495 | AICVK |
| 252490 | LKGEE | 308176 | MDEES | 347443 | QGKPG | 370496 | LLATV |
| 252491 | LKIDS | 308179 | ILTLT | 347444 | LSKVN | 370499 | PLPAL |
| 252505 | FKANP | 308190 | PSWTT | 347451 | NMKMI | 370502 | GSEPT |
| 252506 | ITLPE | 308193 | QVPED | 347454 | HGGVL | 370503 | DQDSA |
| 252510 | DEEED | 308196 | RKRKQ | 347457 | SSLLD | 370508 | NVLHQ |
| 252512 | NDMMS | 308208 | LLDKV | 347458 | ACFMG | 370514 | RRIKE |
| 252519 | VQTSF | 308219 | LIVFL | 347463 | VVPPM | 370517 | QPWSV |
| 252520 | FASLF | 308220 | LGTQS | 347464 | KENNN | 370521 | HSLQH |
| 252530 | KKKKK | 308226 | VMRLG | 347472 | FSQDP | 370522 | LPMAP |
| 252542 | FTRRY | 308236 | ISQPN | 347474 | KILHC | 370526 | EDDPQ |
| 252543 | AAKKD | 308252 | KLTHL | 347481 | SMHRR | 370531 | KHSKI |
| 252575 | EGNFC | 308258 | APTPN | 347486 | TEEGD | 370532 | VLTLG |
| 252576 | FMWYT | 308268 | LSHFK | 347495 | SFDFQ | 370537 | VYFSL |
| 252590 | APSSG | 308270 | VGWSV | 347498 | AGQEH | 370541 | GGQIT |
| 252593 | SALLQ | 308275 | TYGIY | 347501 | VFSIL | 370545 | QPLPS |
| 252595 | GAFAL | 308279 | TKSSQ | 347504 | TSEKP | 370546 | GDGTP |
| 252597 | GDTFL | 308280 | YREGF | 347507 | GLNEE | 370547 | TACHH |
| 252599 | ARDEL | 308292 | QQEKQ | 347516 | PGSKS | 370557 | RLKIS |
| 252602 | KSLSH | 308312 | EEDLA | 347520 | HVHRF | 370564 | VPNNV |
| 252603 | KHSTL | 308315 | EEETR | 347533 | KKKKK | 370565 | QDDAA |
| 252622 | QQQDA | 308318 | LGPYY | 347538 | SLEVT | 370568 | QSSSA |
| 252631 | RFPVM | 308330 | IILTC | 347549 | LNHPY | 370571 | LSAIG |
| 252655 | EEELS | 308332 | NAEGE | 347555 | MHYTD | 370575 | TLELS |
| 252660 | VETVV | 308339 | PTQPC | 347577 | NLKTP | 370588 | TLLEK |
| 252669 | DHMYH | 308344 | EILRV | 347581 | TSPTQ | 370589 | ASQED |
| 252674 | EAVAT | 308351 | STFSK | 347582 | PILPQ | 370593 | DHYAT |
| 252675 | AAWFT | 308352 | SGIVQ | 347586 | SFLAT | 370606 | WAVIL |
| 252677 | SCTCR | 308354 | RLCCL | 347591 | LTETS | 370607 | IPFIL |
| 252699 | GESDL | 308361 | STDTL | 347592 | KKAKQ | 370612 | AHLAM |
| 252713 | TKENS | 308368 | RQVLQ | 347596 | GPFSF | 370613 | GRWRL |
| 252723 | RTGDR | 308369 | SQGSS | 347601 | FVAQH | 370614 | HIFNM |
| 252725 | DLKIK | 308405 | QQKTA | 347602 | AVECR | 370615 | NSDCR |
| 252729 | GHRAT | 308412 | VAFLA | 347609 | LLLSL | 370616 | DSSFL |
| 252744 | RERFG | 308413 | GRPGR | 347611 | TGEKP | 370624 | ALHSE |
| 252773 | AAPAP | 308430 | ESKSS | 347620 | TSTIF | 370629 | KFDLS |
| 252785 | RSVLS | 308450 | HQGIR | 347626 | GAVQF | 370639 | ILARK |
| 252797 | FQECG | 308461 | SCSIM | 347646 | LVFTY | 370640 | NSNYY |
| 252799 | PGLLG | 308466 | GTLTA | 347648 | KRGRK | 370658 | PVDIE |
| 252804 | AEEKP | 308479 | CENNA | 347649 | EPELA | 370659 | CKEMV |
| 252809 | DCHCI | 308496 | LELLS | 347650 | FSRLT | 370668 | AGGSK |
| 252816 | QAGKQ | 308533 | ADEPS | 347675 | LGMAS | 370671 | NKAET |
| 252818 | QVPAY | 308534 | HQNRY | 347687 | LPVDH | 370673 | MKENS |
| 252825 | ETPEP | 308535 | TSSMV | 347689 | DNQRT | 370678 | NRQEG |
| 252835 | SSNII | 308540 | VEVKF | 347695 | DEDQL | 370679 | KEILL |
| 252840 | HNRQM | 308541 | DQFGE | 347696 | NLVSL | 370697 | QESVF |
| 252857 | NDVDE | 308546 | RSPSH | 347698 | FIKQK | 370702 | ACLIC |
| 252889 | PTMPS | 308548 | EELPS | 347703 | KSWAS | 370703 | LDTNI |
| 252891 | FEIEL | 308549 | ERPDD | 347710 | PGDES | 370710 | CQKRQ |
| 252898 | FESES | 308575 | SNGMS | 347712 | ALLLL | 370713 | FLLTL |
| 252900 | QVRWT | 308576 | FCVVT | 347714 | PSVCK | 370718 | TKVAP |
| 252909 | CLVAR | 308578 | MWESL | 347716 | YITLT | 370719 | LFDEP |
| 252934 | DTPKP | 308591 | GPQGP | 347717 | LPGIF | 370727 | SFPFL |
| 252936 | AVTAQ | 308595 | IRKLY | 347721 | STEEP | 370729 | GGVAS |
| 252939 | PPPAQ | 308606 | IQSEL | 347722 | STCAH | 370735 | QSVSN |
| 252945 | VIPRS | 308610 | SCGGL | 347730 | DLCGK | 370736 | PDSGF |
| 252951 | TEKYR | 308620 | RRLFD | 347737 | FCDNN | 370740 | KRASS |
| 252971 | QPAPQ | 308621 | GLLTP | 347741 | LFPGN | 370744 | HMPPH |
| 252979 | GEASS | 308622 | SFWRS | 347744 | RAMLQ | 370748 | KIYRM |
| 252985 | PGLSS | 308683 | SLKFS | 347745 | LDSIF | 370750 | GLPID |
| 252992 | NCVTQ | 308685 | GPPLS | 347748 | KAINA | 370752 | ASMGR |
| 252996 | KAFLK | 308689 | QPQSV | 347754 | IWQYA | 370755 | ADGGR |
| 252997 | ALALA | 308695 | EVVKE | 347755 | LTEHQ | 370761 | TNKTN |
| 252998 | PWEET | 308699 | GPRFH | 347767 | VLILM | 370763 | GGAHL |
| 252999 | GCPAA | 308708 | KVESV | 347774 | PRQHP | 370765 | LAWLF |
| 253001 | GTGRV | 308714 | PARRP | 347778 | SNEDV | 370766 | GRPGK |
| 253003 | DMSLD | 308716 | ACGCS | 347780 | KLTQN | 370770 | GHGVS |
| 253004 | KVTAK | 308718 | FPPGF | 347792 | PLAKT | 370775 | FSCFS |
| 253008 | PAMVL | 308720 | IAANS | 347794 | MWVKG | 370777 | SILVY |
| 253023 | ERCLK | 308727 | EMEKV | 347799 | EWKHQ | 370779 | IKVSP |
| 253024 | PGDGP | 308733 | GEGVK | 347802 | SMEEE | 370781 | VWNCY |
| 253031 | SLAPS | 308741 | KVQPQ | 347810 | NRKKH | 370783 | QRSQN |
| 253039 | TVDDD | 308750 | NLRHY | 347817 | VLGKL | 370793 | VGSLS |
| 253047 | RPPPE | 308753 | EGDHQ | 347819 | VVSCP | 370794 | GEALP |
| 253048 | SPFCQ | 308759 | EQTHN | 347820 | EPMVS | 370800 | MLTGG |
| 253050 | PRKGD | 308761 | IYRKV | 347823 | RPAKV | 370801 | MLTCR |
| 253054 | LSFFR | 308764 | SNLGS | 347834 | MMPTW | 370803 | NVATI |
| 253055 | AHGSH | 308770 | FRTEI | 347836 | QDMEL | 370805 | YDEGP |
| 253063 | TRYMT | 308772 | VDTSL | 347838 | EGFAE | 370806 | YDEGP |
| 253079 | TFVSY | 308774 | EKDKH | 347845 | YSQEK | 370808 | LKKVI |
| 253083 | QLVNY | 308782 | SITLI | 347847 | WDSCL | 370812 | WLNPR |
| 253099 | TPYHC | 308820 | PQGLE | 347858 | KIFMS | 370822 | GNPRA |
| 253108 | KPSTN | 308821 | RITAG | 347864 | TFTFK | 370826 | LQEAK |
| 253109 | RPLKL | 308828 | HHANS | 347868 | LISIR | 370839 | CGNTH |
| 253110 | GGPRE | 308833 | PGSSR | 347872 | PEKEN | 370842 | KLSET |
| 253115 | HEQIH | 308845 | HVQKK | 347877 | FDNVI | 370843 | IFNFL |
| 253144 | RIHNS | 308857 | KDPSS | 347883 | LGSVC | 370844 | SPSDV |
| 253159 | LTHVF | 308870 | RNAYV | 347884 | CLLHH | 370849 | LEGEP |
| 253188 | PSKPQ | 308875 | SFPSF | 347890 | PSLLD | 370854 | GMELN |
| 253193 | ALLVC | 308887 | QYICK | 347896 | RKLAP | 370855 | GTHCR |
| 253233 | SKKVH | 308893 | TLEKS | 347900 | ILEIE | 370856 | GTHYR |
| 253237 | RTISV | 308895 | QNVNQ | 347906 | FPIWR | 370857 | KFDLN |
| 253247 | VLELF | 308897 | EAAKK | 347910 | EKPYE | 370859 | GMEWN |
| 253255 | VYLVV | 308901 | KPQLA | 347915 | IGWNK | 370861 | GMEWN |
| 253262 | RHCSQ | 308903 | YVTMN | 347919 | AGAHH | 370864 | LTPPA |
| 253270 | LDLKS | 308908 | IFTIS | 347924 | YHRGV | 370867 | IDVAE |
| 253303 | YSYAG | 308916 | TEYCR | 347929 | SGKKE | 370873 | QPSAS |
| 253320 | PLGID | 308921 | FSEPL | 347930 | DDDEE | 370875 | NLSPL |
| 253323 | TFTPL | 308925 | RTDCL | 347931 | LEHQY | 370880 | PPYSP |
| 253325 | TFTPL | 308926 | PGSYS | 347933 | VLFEK | 370881 | TLNFI |
| 253329 | KSKYR | 308927 | AGQAN | 347944 | PGSKD | 370883 | TCIHY |
| 253332 | ELTES | 308928 | MSLYK | 347948 | RSPNH | 370884 | LSGGL |
| 253335 | ILPGI | 308937 | LRKRE | 347959 | SDKHR | 370889 | KCFEG |
| 253339 | DLVYV | 308938 | VMRNN | 347965 | VVARC | 370890 | ATCLS |
| 253354 | SPVSQ | 308957 | KNNLG | 347977 | GEKIA | 370898 | DDQLC |
| 253362 | LQTLI | 308970 | SGNRN | 347978 | RKRKT | 370903 | QSFNI |
| 253363 | VPSRR | 308976 | TLHIY | 347984 | GQYDG | 370904 | GVNDP |
| 253375 | PGKRN | 308978 | EITLV | 347985 | LRLYT | 370920 | SESSL |
| 253381 | VHHSS | 309003 | PEPAG | 347997 | KLRQS | 370923 | PPHGV |
| 253382 | CLTIQ | 309007 | QDYIS | 347999 | FKDLN | 370936 | LEVSN |
| 253392 | EVPSP | 309012 | KKLLP | 348010 | PPPPT | 370938 | QTHRY |
| 253401 | TPFKK | 309020 | TLYDL | 348019 | HGHRH | 370943 | DCSVS |
| 253407 | IIYSD | 309031 | PMDHS | 348020 | PCEPP | 370949 | THDVN |
| 253408 | HKDVM | 309036 | TFKNW | 348024 | SFVDF | 370950 | VPGEN |
| 253410 | DAGEK | 309048 | VQGLL | 348027 | FRISP | 370952 | SAEEQ |
| 253413 | RKFLD | 309052 | EDFRN | 348031 | ESEQK | 370962 | PFQGF |
| 253435 | FIHFS | 309087 | KDTLV | 348033 | RKFLY | 370964 | KLHYK |
| 253452 | NEWKK | 309089 | KLRLG | 348043 | RAPLP | 370966 | QVVQF |
| 253457 | VLHLC | 309092 | PRIIM | 348046 | EEGWR | 370968 | SSSKK |
| 253458 | KGYPR | 309095 | MKFFI | 348062 | FKSVS | 370979 | WKLWR |
| 253461 | CPSAS | 309096 | SPRRC | 348064 | LFVAL | 370990 | EALGL |
| 253462 | QSQDF | 309103 | SAPSQ | 348067 | KTEKE | 370997 | QMQPI |
| 253470 | TTSRG | 309110 | DPASE | 348068 | NPTQK | 370999 | LYQIS |
| 253475 | RPAWP | 309116 | EEPSP | 348069 | TVTSS | 371024 | GKDEL |
| 253481 | AKQQA | 309117 | RFAPY | 348074 | LRSSV | 371029 | GDVSK |
| 253490 | IFNIF | 309124 | NLRAQ | 348079 | QGFRL | 371031 | TAPLF |
| 253496 | EHTVS | 309126 | TPPCT | 348081 | IQIFV | 371035 | RVSCK |
| 253513 | LLKEG | 309132 | HEEVD | 348082 | PRSAT | 371037 | GRSDH |
| 253571 | RESVV | 309141 | KETVV | 348086 | DKFRC | 371040 | LARFC |
| 253577 | GNCSC | 309142 | DLKWK | 348089 | KPEYC | 371051 | WNVEC |
| 253669 | GRDLS | 309148 | TIQAK | 348094 | SHPRV | 371054 | VTKIY |
| 253673 | VKRKY | 309161 | TGEEP | 348097 | GSPGS | 371058 | FVEGF |
| 253680 | APGYC | 309163 | APLCS | 348099 | AFSHV | 371061 | HHRCN |
| 253686 | ADAQD | 309166 | RYSAF | 348104 | RNKQT | 371067 | DNMAG |
| 253692 | SPLDI | 309175 | EEEAA | 348107 | GKSKS | 371068 | VQRLT |
| 253693 | ITQLQ | 309181 | PPGKH | 348108 | PYGRY | 371069 | WMRTN |
| 253697 | QASKK | 309186 | FVESF | 348109 | LVLQV | 371073 | KLLWC |
| 253699 | KGGTD | 309189 | KPSRV | 348110 | ATKKN | 371082 | DNLAT |
| 253704 | TPDCR | 309198 | GFELS | 348113 | KKTAP | 371084 | RPDEW |
| 253719 | AQFPG | 309230 | ILQHR | 348115 | HWAWG | 371085 | APLIR |
| 253720 | PIFPL | 309233 | TSASL | 348128 | AKGLF | 371090 | WNKSD |
| 253727 | WDVHE | 309249 | LTSTS | 348129 | GSKDD | 371092 | AKANF |
| 253754 | KVELV | 309252 | GKLHK | 348132 | ANFDC | 371096 | EINTS |
| 253778 | SVTVE | 309259 | VSAQA | 348135 | VICVS | 371099 | MGQRP |
| 253788 | QKLRF | 309262 | GLLGH | 348138 | AFGGQ | 371101 | GRSFH |
| 253789 | TLPDP | 309270 | FRPFS | 348145 | EDAMG | 371102 | LGHLL |
| 253792 | EHMSM | 309276 | PFSRE | 348150 | AEAAP | 371103 | ASSSS |
| 253794 | GVKFF | 309285 | AFLPS | 348153 | SGSIP | 371116 | QRCSQ |
| 253796 | SEAQA | 309297 | NVHPC | 348161 | SIMIC | 371120 | KQSQC |
| 253799 | SYHGF | 309302 | IQKIS | 348168 | ITSSK | 371126 | QRCSQ |
| 253801 | HKKSL | 309314 | PMGLL | 348170 | TIAEN | 371135 | SECDI |
| 253803 | SDCIM | 309324 | KKMEM | 348173 | SPAHR | 371136 | QSIRC |
| 253811 | VGRAS | 309330 | NFDNT | 348175 | SHSMK | 371152 | PCIGW |
| 253812 | SNLLQ | 309332 | PIQVI | 348183 | EDSDS | 371153 | KQSQC |
| 253814 | VLFIY | 309334 | LHRYR | 348186 | RARLS | 371155 | KRGKR |
| 253815 | QKYAM | 309336 | SKEAL | 348190 | SLRPA | 371161 | LLKLE |
| 253856 | GTAEE | 309358 | LCLFD | 348191 | MTAVK | 371169 | SKTLK |
| 253861 | KITTV | 309376 | NYHTL | 348193 | IICWV | 371170 | KQSQC |
| 253925 | RTYSC | 309378 | CCSHF | 348197 | KVGAR | 371173 | KQSQC |
| 253928 | DGESQ | 309392 | RSSCR | 348200 | QVIQF | 371175 | TWGSL |
| 253934 | VESPC | 309402 | KEKSS | 348205 | ILFAM | 371176 | ESTTV |
| 253968 | RSRED | 309415 | TPLSR | 348206 | AFAEK | 371185 | SLISA |
| 254029 | RKNVS | 309417 | QLGQK | 348216 | VTDRK | 371186 | SCSSP |
| 254035 | QFGKK | 309429 | GHTAS | 348218 | GPTRV | 371190 | DEAAS |
| 254037 | KVVNF | 309430 | PEKTD | 348222 | PDKCV | 371194 | GGPAP |
| 254043 | HKREI | 309431 | EEEVA | 348226 | DLEEL | 371196 | GGWPL |
| 254051 | DAERM | 309432 | SSRSH | 348234 | EECDK | 371197 | LGYWE |
| 254072 | QPSCC | 309433 | EETES | 348237 | GKAKK | 371200 | PDHQN |
| 254090 | IIAYF | 309439 | EQGKE | 348240 | CGQLE | 371201 | PRRWL |
| 254101 | LYKPI | 309457 | LEMKK | 348249 | GSDGL | 371202 | HTHTH |
| 254108 | RERPY | 309462 | NCKNY | 348253 | ENTDD | 371205 | PPRAP |
| 254109 | EPGPS | 309463 | EDSPN | 348258 | YGFGG | 371206 | LKKQN |
| 254122 | GEMKE | 309474 | EYIDD | 348267 | SCAQE | 371211 | QQVVT |
| 254165 | EATSQ | 309477 | RKMAK | 348273 | PMARR | 371212 | VYQTY |
| 254166 | KKIHT | 309482 | SLKES | 348278 | QLSVS | 371215 | STAGT |
| 254181 | LYRPA | 309487 | QFSHL | 348283 | GFGQE | 371219 | ECKIF |
| 254182 | RHHEC | 309493 | RMSSI | 348286 | HFVMC | 371220 | ERNAR |
| 254190 | SVRTA | 309501 | YAPDN | 348298 | ESKNE | 371221 | ARMTC |
| 254193 | VTNGS | 309503 | EGGEN | 348299 | KYKLL | 371224 | FVFKI |
| 254227 | MLLLR | 309504 | TMPPL | 348300 | LDRIL | 371230 | ASVTP |
| 254231 | PEAQN | 309509 | AMRTF | 348302 | FSYFP | 371231 | AWSRA |
| 254235 | GLGLN | 309515 | LAPPG | 348305 | VGPLI | 371232 | ASVFT |
| 254250 | VEVPA | 309520 | KVNAQ | 348308 | VRVRG | 371234 | REYCR |
| 254260 | DSSWY | 309521 | PASLP | 348312 | YELEG | 371236 | WVKEE |
| 254262 | FTQPR | 309524 | GSCGF | 348314 | TEEKK | 371242 | AEINV |
| 254271 | CIYFV | 309538 | QPRKC | 348316 | LDLFH | 371243 | KSSKY |
| 254279 | ILRIM | 309539 | ITSLG | 348336 | APQRL | 371255 | PLHQE |
| 254286 | FSTEK | 309542 | LAPVA | 348337 | SLLYR | 371272 | PELDF |
| 254299 | TLIRS | 309548 | YYKGG | 348349 | NEFMV | 371278 | MMDTV |
| 254301 | SYTMI | 309560 | AEIAK | 348379 | SINIR | 371281 | KSTPV |
| 254302 | ATSSF | 309561 | KARTK | 348380 | VSKRY | 371284 | LDRWG |
| 254320 | ILVSW | 309565 | FNNLK | 348381 | EKVEA | 371288 | TPSCK |
| 254321 | GKAFS | 309570 | MKRHI | 348384 | YATCK | 371290 | PQPPE |
| 254322 | QVLPI | 309572 | KTILD | 348394 | CLSEP | 371291 | GGSQL |
| 254323 | RERFG | 309576 | EVRSW | 348395 | RRRLV | 371294 | SSLKG |
| 254325 | ALPSS | 309591 | EFSEF | 348401 | QAASR | 371307 | LWSQR |
| 254336 | PWREL | 309595 | SKRSK | 348411 | EAHFV | 371308 | MDTEL |
| 254337 | TWIVL | 309597 | PEAGP | 348415 | HLQQW | 371310 | IKIHN |
| 254351 | EEFYA | 309600 | WGLNH | 348425 | WGFQP | 371318 | TLQRS |
| 254354 | GQIHR | 309606 | VEMGT | 348429 | EHIQD | 371319 | EQRYF |
| 254436 | GSTDY | 309610 | LSSTS | 348431 | CGPIR | 371321 | KSSKK |
| 254442 | HRFMV | 309619 | ILFIQ | 348432 | KQMAP | 371322 | NVKKN |
| 254454 | RSWRP | 309620 | KILNN | 348442 | IHNLQ | 371326 | CKHKL |
| 254457 | EAAVW | 309622 | SSSPE | 348449 | KRVLF | 371328 | DIMIA |
| 254466 | EESWV | 309629 | EGKPL | 348455 | RSSDK | 371333 | KQQLI |
| 254480 | ASAAP | 309640 | PIPED | 348459 | RKQFE | 371338 | PETSV |
| 254488 | KETHF | 309644 | SQDTS | 348460 | ERKED | 371341 | AHHKR |
| 254508 | AYASH | 309649 | EGTRS | 348461 | KCLLL | 371345 | AEPVT |
| 254521 | SGSCL | 309653 | IYTDT | 348463 | SSFLI | 371347 | RPLDI |
| 254528 | FLSHL | 309661 | TISEI | 348467 | LSYGA | 371348 | VDSWN |
| 254579 | GDAEG | 309671 | WGHCP | 348472 | APKIG | 371350 | TGDTT |
| 254584 | WLEEQ | 309673 | RKSPL | 348476 | EIDMA | 371352 | ADKDE |
| 254605 | LYKRR | 309681 | YRFKR | 348477 | DVGLG | 371356 | TGDTT |
| 254616 | SPSGS | 309689 | RLLGS | 348489 | ARADR | 371364 | PIPEL |
| 254624 | DLCVY | 309690 | VKFML | 348496 | YPKRD | 371369 | HTPRA |
| 254630 | TSEGK | 309697 | IQLPG | 348501 | NRETL | 371374 | RRSLT |
| 254636 | QVQPE | 309710 | LFIQI | 348510 | KWIHL | 371376 | NDVKS |
| 254654 | VRIGH | 309714 | LRKKP | 348512 | TTPKF | 371377 | KRISS |
| 254657 | IEEQT | 309741 | IVKEG | 348514 | EGRQL | 371379 | KIHSP |
| 254661 | TEGIV | 309749 | QEILE | 348518 | ECGKA | 371383 | FSCPW |
| 254663 | LEDQA | 309751 | GLEED | 348519 | LSVEN | 371388 | TPDLQ |
| 254667 | YANFK | 309757 | NKKSG | 348523 | LVEDN | 371390 | EELWT |
| 254691 | RGGKH | 309762 | NTVLW | 348527 | IFQIE | 371393 | QPKAD |
| 254695 | SGAGH | 309766 | EPMNL | 348541 | GHGKF | 371394 | PLPHS |
| 254712 | AQPQI | 309767 | LISTF | 348545 | PILPQ | 371397 | EPHSG |
| 254719 | RSALM | 309771 | QRQGR | 348547 | WLTEG | 371398 | VYTEG |
| 254722 | DPRGP | 309772 | NKRTM | 348549 | PTTSV | 371400 | ALSVS |
| 254730 | MVQSP | 309782 | PGNAS | 348551 | LSDSE | 371401 | KLGSH |
| 254759 | EKLKK | 309786 | AFGGQ | 348552 | KRFLQ | 371404 | RWLPG |
| 254765 | RYCDK | 309790 | NSDSA | 348554 | SDHST | 371405 | QDISP |
| 254770 | SSKRD | 309794 | FGFRR | 348557 | TGVSH | 371409 | WRKSL |
| 254781 | SQKHT | 309812 | GGKNL | 348562 | YQVLE | 371412 | HRAWP |
| 254799 | CPKGK | 309818 | SFSQS | 348564 | VLAQS | 371419 | HYSQG |
| 254800 | LLLQA | 309823 | GEELS | 348565 | KMKNM | 371420 | FKGVS |
| 254801 | ACYPD | 309826 | VTLEQ | 348577 | TLYKV | 371425 | VLQTL |
| 254803 | SIKLK | 309830 | VKELK | 348578 | LAPRQ | 371429 | FPMIT |
| 254806 | DKKTQ | 309831 | CLMEN | 348580 | PPKPM | 371434 | TYTAV |
| 254810 | RGERA | 309836 | KTGKQ | 348589 | THRLL | 371437 | IDQRF |
| 254816 | VLKRR | 309845 | KCVLS | 348591 | NLLTL | 371439 | KKKSK |
| 254835 | SRKTI | 309871 | SPMLK | 348593 | QTLSK | 371449 | DAMFT |
| 254846 | ASTSR | 309878 | GSVKT | 348596 | RKRMK | 371451 | KRKNR |
| 254853 | DPCGP | 309893 | RRAEM | 348610 | AIAAL | 371452 | EFKAE |
| 254854 | PGQFS | 309913 | WSDNS | 348611 | FDTAL | 371457 | VMPPP |
| 254867 | KRFHF | 309934 | RRPSQ | 348619 | RQFIA | 371462 | CKIEF |
| 254868 | SQESH | 309939 | SCSRC | 348632 | CQNCH | 371465 | MLFAL |
| 254878 | TTASL | 309945 | ASVLI | 348634 | MHDEE | 371466 | VPKQS |
| 254898 | RLRYR | 309953 | GAYTF | 348635 | TQQAF | 371471 | LKLDW |
| 254900 | GKPVF | 309968 | KETEC | 348639 | SKTGM | 371475 | DYVSH |
| 254908 | AAASV | 309982 | SPRGR | 348645 | QDCCA | 371476 | LPSRE |
| 254928 | VKLLK | 309985 | PDECV | 348646 | DAVID | 371477 | EKQDR |
| 254940 | EETLT | 310003 | TLVSF | 348657 | ELLNS | 371483 | ECTAL |
| 254942 | RLGMN | 310008 | SGGQP | 348659 | PGGKL | 371490 | RLSFM |
| 254950 | FGQES | 310015 | YHQFK | 348668 | LWLFV | 371493 | FGSPK |
| 254958 | MEYIV | 310036 | ADTEL | 348670 | HVHSP | 371502 | FVEGL |
| 254976 | MLGSG | 310040 | KLVNL | 348673 | LDSVM | 371505 | NKIYL |
| 254998 | QDWAS | 310042 | VQVRF | 348685 | YTGPR | 371508 | LSPPF |
| 255006 | DLTTS | 310048 | PTSTI | 348692 | CQYLY | 371510 | PDHSP |
| 255008 | RTTTF | 310057 | QIENN | 348695 | GCWNK | 371512 | ICLWS |
| 255030 | PQLWP | 310071 | YRSIR | 348697 | TEASS | 371514 | PRQEN |
| 255039 | CYAEN | 310073 | LSQTP | 348703 | GEKHS | 371517 | SNIQK |
| 255040 | PLVWV | 310075 | IGALQ | 348706 | YTSSK | 371522 | SSGAH |
| 255078 | KERGT | 310094 | LPPWR | 348710 | ATTLG | 371529 | GLLRL |
| 255082 | PSPAS | 310102 | RVVCL | 348714 | GFGML | 371532 | DDDLA |
| 255084 | SCTLL | 310110 | PPYSP | 348722 | TTWLR | 371536 | HKPLP |
| 255087 | GLKME | 310111 | TEIKI | 348729 | DLLTS | 371537 | MYLFI |
| 255108 | DEGSG | 310117 | TPQKK | 348731 | SCPVG | 371542 | TPFRK |
| 255132 | LANQK | 310120 | QRFMW | 348738 | LGIFI | 371548 | VDLSL |
| 255152 | AVMHY | 310126 | NMKMI | 348749 | PHQMT | 371553 | TPALK |
| 255174 | EMMYT | 310129 | PNYDL | 348751 | TNKSA | 371554 | ECKAA |
| 255175 | SRDFS | 310135 | EPEEQ | 348752 | SLQVL | 371558 | TVTLR |
| 255183 | YISVP | 310146 | RRLGG | 348753 | HKAAA | 371559 | YHILL |
| 255189 | GKDKT | 310149 | AVPRP | 348757 | RSRRS | 371568 | FPFCP |
| 255192 | SKPDF | 310153 | KHLLS | 348762 | LAGHP | 371572 | LFSSQ |
| 255194 | VLSQG | 310170 | TLLAL | 348763 | GFTMV | 371577 | DLGDV |
| 255198 | TKVLL | 310172 | KYVAV | 348769 | DFHDT | 371581 | THGLT |
| 255224 | VLCDG | 310180 | KSVFG | 348772 | LDSEE | 371582 | QEAFV |
| 255226 | AYDVS | 310182 | IYVQQ | 348775 | LKSKL | 371594 | HPPQG |
| 255262 | HFNKT | 310189 | TSKDR | 348784 | RQNMG | 371595 | CQCKI |
| 255263 | GPLLP | 310193 | LDTRF | 348786 | SCLLL | 371597 | RQALC |
| 255266 | SCCIQ | 310200 | WMGGQ | 348787 | MEAVP | 371600 | TLQPG |
| 255289 | STTPR | 310205 | NTSEA | 348793 | SAHLS | 371602 | AHDIR |
| 255304 | LFENY | 310208 | QETSL | 348799 | SENLT | 371603 | CQCKI |
| 255305 | LLCVK | 310216 | LICFL | 348801 | EEDDE | 371604 | CQCKI |
| 255380 | PEQAL | 310219 | IEEVD | 348807 | HVSGA | 371606 | CQCKI |
| 255381 | VISEE | 310226 | GGGCC | 348813 | PVHSS | 371607 | LMDSE |
| 255389 | SHKRS | 310241 | SSTYF | 348815 | PLSPS | 371611 | PSAGR |
| 255390 | YRKKS | 310244 | QGDCS | 348816 | VKVFV | 371614 | RREQP |
| 255403 | NPRPL | 310255 | GAGPT | 348819 | VPFHG | 371634 | SQRSK |
| 255409 | ALAAT | 310260 | HINSN | 348821 | GKKAK | 371635 | RPAVT |
| 255416 | ASAAH | 310263 | ATSCL | 348828 | LETNV | 371639 | SILIC |
| 255465 | VLLLQ | 310274 | PLKLQ | 348831 | PDSDP | 371640 | GNPAP |
| 255468 | QTLLS | 310275 | CDAFL | 348838 | TSQEP | 371643 | ILTGK |
| 255476 | PGTSM | 310301 | NETME | 348840 | GKFSK | 371644 | DPWVH |
| 255495 | NHILD | 310303 | LKNKS | 348842 | VMGWP | 371646 | WHFVM |
| 255499 | REIKS | 310305 | KDIRL | 348849 | PPKPM | 371650 | PSIWK |
| 255513 | LQKPH | 310309 | QARLF | 348859 | AHQLL | 371652 | KHRPM |
| 255557 | GRPLT | 310332 | KPLDG | 348864 | GEEGK | 371659 | SSKPV |
| 255608 | VIFYT | 310334 | RHQKS | 348869 | AGRPV | 371660 | LTPDG |
| 255612 | LPLGR | 310335 | YISIL | 348870 | ALATN | 371676 | GYIMR |
| 255613 | GGEEL | 310337 | EAKGK | 348873 | EDWRE | 371678 | FSTDV |
| 255622 | TCCIL | 310338 | SSPVK | 348875 | LANCF | 371682 | LTASL |
| 255631 | DSMDR | 310355 | VKLQC | 348877 | EARVQ | 371683 | AFASQ |
| 255641 | LQRHK | 310356 | HRNIP | 348886 | RVKMS | 371687 | REGVL |
| 255674 | LLNSS | 310357 | QVNTC | 348888 | GPQEA | 371693 | RLGSL |
| 255681 | YFPVA | 310360 | EEEDN | 348892 | KPHLS | 371696 | VACGD |
| 255684 | YCVHS | 310375 | VQMAQ | 348897 | LGVSP | 371706 | SHLLE |
| 255688 | KKATA | 310382 | QNVFI | 348901 | ACRLL | 371707 | CNFIS |
| 255695 | KRERQ | 310393 | NLGIW | 348911 | LDKNL | 371708 | HGPLL |
| 255741 | PAAQP | 310405 | GASFY | 348912 | RSCLW | 371711 | IEEDE |
| 255746 | PYKCE | 310406 | RAAEE | 348915 | DQVCT | 371715 | SPVGR |
| 255759 | QAVNR | 310431 | ASMPA | 348917 | EQERL | 371724 | PRSQK |
| 255764 | DHPPS | 310435 | TIHVL | 348918 | LPEKY | 371734 | RGSFD |
| 255784 | SQSEL | 310440 | NLRRD | 348924 | YTSSK | 371735 | MQQKV |
| 255830 | QSTEL | 310447 | LESMV | 348931 | FFNYM | 371741 | PLVSG |
| 255845 | EPAGY | 310448 | NTITK | 348933 | SDEFM | 371747 | CPNIF |
| 255858 | PSPTQ | 310459 | LVFPV | 348936 | RRSQQ | 371750 | LTAVF |
| 255882 | NDIPY | 310465 | RSLAV | 348941 | PSPPS | 371757 | YASVI |
| 255890 | RFPAP | 310471 | RYSAF | 348944 | SAGPA | 371760 | PVRGE |
| 255896 | FMTNQ | 310472 | ETQLI | 348959 | NPAVR | 371763 | ACWWL |
| 255945 | LFAED | 310488 | ADSCP | 348960 | RDQEN | 371767 | ESDHN |
| 255977 | YDLDL | 310490 | LDTTC | 348964 | AVYYC | 371774 | PVRGE |
| 255992 | RWGAH | 310491 | DPSGL | 348965 | VLCTE | 371780 | ESGSK |
| 255998 | RPGRD | 310492 | CQCKI | 348974 | GKTNS | 371783 | SRTQL |
| 256001 | FGVMS | 310493 | EVLQS | 348978 | VRRYQ | 371785 | AQFSK |
| 256010 | DSYYY | 310505 | RSSHL | 348982 | GPARH | 371786 | TFSKA |
| 256015 | MTVSG | 310515 | RCRRH | 348984 | FLNRY | 371787 | MTLMG |
| 256031 | IITIT | 310520 | GKGKK | 348987 | PRRGG | 371789 | GVAGH |
| 256062 | EKDQT | 310521 | PDYDV | 348989 | VRMTQ | 371790 | ILSQS |
| 256078 | KCIIM | 310528 | AEALP | 348996 | ATVIG | 371800 | RYSDD |
| 256079 | VPSNN | 310532 | PQKQD | 349000 | SYLYL | 371811 | GKGLF |
| 256104 | VYERA | 310547 | QYLET | 349007 | GKDRG | 371812 | SQKNL |
| 256108 | RDDED | 310551 | SKKNE | 349016 | ESERD | 371813 | TTVTS |
| 256117 | QILNY | 310557 | RVSMI | 349017 | TSSLR | 371818 | AEEGR |
| 256119 | VRASF | 310561 | QIHAE | 349022 | RTQPE | 371824 | HPRDS |
| 256151 | IQEKC | 310565 | PKFMD | 349029 | PQQPA | 371825 | KTQST |
| 256172 | LPWPL | 310568 | LEDRN | 349041 | AASGR | 371829 | PRSQK |
| 256178 | LEAEV | 310572 | KKLWK | 349052 | MMDEL | 371835 | VSPTG |
| 256183 | TALTN | 310573 | KSQSN | 349057 | NTTLE | 371838 | HFRWN |
| 256186 | QLSRT | 310585 | PTQAP | 349071 | PLLKH | 371846 | EKVTV |
| 256190 | CISDA | 310590 | LSYRR | 349076 | SDKPL | 371847 | ALTHN |
| 256194 | HPLLG | 310593 | FAKVF | 349078 | YKRRK | 371856 | HGPLL |
| 256196 | HCVIF | 310594 | PHCGE | 349085 | EEEGV | 371860 | SHLLE |
| 256216 | DYAKL | 310596 | TLDEY | 349087 | SEVGS | 371872 | GKVEE |
| 256246 | FHPGH | 310620 | LKGEP | 349096 | EMTAS | 371873 | DQVCT |
| 256255 | GTRRR | 310621 | KEKPE | 349101 | GRSRY | 371875 | AAGTQ |
| 256257 | LDELV | 310622 | KKGKK | 349109 | PFTDV | 371877 | IQRRD |
| 256261 | QGLEA | 310623 | EAEKK | 349112 | SCEEL | 371882 | QIMKA |
| 256319 | QKKRN | 310631 | NEMGA | 349114 | AERTC | 371883 | VKAVF |
| 256324 | TTAQV | 310632 | PTALP | 349116 | ISQSE | 371886 | QRRPH |
| 256343 | SKSEE | 310643 | TGRMM | 349128 | LTLRS | 371890 | WTITY |
| 256362 | TLVDG | 310658 | LRPYK | 349140 | KALLQ | 371897 | PLGII |
| 256365 | KTKTT | 310663 | LRKTS | 349142 | AAALD | 371900 | YESSL |
| 256366 | YRQQL | 310668 | EVLMN | 349143 | THQSL | 371910 | LGSED |
| 256367 | EKEAM | 310670 | PAPSN | 349145 | WDTTI | 371911 | KRDHP |
| 256379 | RMRLQ | 310686 | PYNHV | 349147 | TPLIT | 371914 | KRDHP |
| 256383 | AKAED | 310688 | EDETS | 349149 | TEERP | 371917 | DHSPA |
| 256389 | EDEEG | 310704 | FPQNC | 349161 | FISLL | 371922 | VGGSG |
| 256398 | VKMLK | 310721 | YKVKS | 349162 | SSHRD | 371923 | DDLDF |
| 256404 | EIAAC | 310722 | KAELG | 349163 | ISLGL | 371927 | LQQTH |
| 256409 | VVPPM | 310723 | ETIFA | 349164 | VGLSK | 371928 | SKVSR |
| 256412 | NHTTE | 310726 | TKKWS | 349170 | FLARP | 371929 | CLWNT |
| 256425 | ANKIL | 310729 | PQVAN | 349174 | EIELE | 371932 | SKCCQ |
| 256429 | SGDEA | 310733 | AVRRN | 349175 | LDPFP | 371936 | NYDEY |
| 256433 | LLLFG | 310749 | SASQF | 349185 | IRRMN | 371940 | SAGPS |
| 256441 | RGGPE | 310757 | AKFDS | 349194 | PAHWK | 371942 | LRLCT |
| 256442 | AVAKV | 310771 | TRVAL | 349197 | PPKPM | 371944 | QQSRR |
| 256443 | KKLIF | 310781 | SADEF | 349204 | GCLPI | 371954 | RRHGH |
| 256447 | KYQHI | 310785 | HSAAS | 349205 | VKVWK | 371960 | PGVQG |
| 256452 | EDSVF | 310788 | KHFLC | 349208 | NLFFL | 371968 | ESGTF |
| 256458 | ELFGP | 310796 | KSTFI | 349212 | MELTM | 371969 | HLTAT |
| 256460 | LPHQL | 310800 | SETSV | 349238 | PSLSQ | 371973 | RMRPY |
| 256463 | SFLSP | 310801 | SHIKL | 349250 | QKKKR | 371976 | DCFLY |
| 256474 | QRMGD | 310803 | KVLPV | 349252 | GGGKD | 371982 | TMKRY |
| 256495 | LETKD | 310814 | HNSHS | 349266 | NLHDA | 371990 | KIINI |
| 256496 | KSRRS | 310819 | RAFKR | 349270 | TEKYR | 371991 | AQEYV |
| 256497 | MVGLI | 310826 | VATAN | 349274 | SVVKV | 371994 | KERKK |
| 256509 | FPLRA | 310829 | GNPSF | 349291 | PGVSG | 371998 | TTPVC |
| 256523 | AVQRQ | 310831 | GEPYL | 349293 | WPPRG | 371999 | LLRRF |
| 256538 | YIYNF | 310832 | SAVVD | 349297 | NPLGF | 372005 | GQAKK |
| 256544 | LLQLH | 310841 | QSLTS | 349298 | NLTVI | 372010 | SSISW |
| 256545 | AGKRR | 310842 | KKRKK | 349321 | AFYGV | 372018 | KPNLK |
| 256585 | CKYRP | 310856 | FAWKR | 349324 | LIVFV | 372023 | CAAVL |
| 256592 | VGFSV | 310860 | DQAVS | 349325 | SRRSQ | 372032 | PLHLQ |
| 256594 | NKPVC | 310861 | TFSFR | 349329 | KPELE | 372033 | HGPLL |
| 256637 | EDLLE | 310873 | NKIEN | 349330 | GQGTV | 372035 | QPVYV |
| 256644 | HKMAS | 310874 | SLTEH | 349332 | VENGP | 372043 | VSVPK |
| 256646 | MQVYA | 310878 | FTTCL | 349336 | ISTDV | 372047 | AESCI |
| 256649 | RTVAL | 310880 | RWKSS | 349344 | AKVSV | 372051 | PWSCP |
| 256652 | EDEGN | 310897 | TFWEI | 349351 | SIYCD | 372053 | QAIPI |
| 256654 | YLMLK | 310901 | LVHAQ | 349356 | FGCGK | 372059 | DADYD |
| 256658 | EEIKS | 310928 | YKDMY | 349359 | LAGAP | 372062 | VVTPC |
| 256680 | KSKKK | 310935 | RRTEL | 349364 | DSSMR | 372064 | RLFWE |
| 256682 | LKNKK | 310951 | KRMSK | 349365 | LSPQP | 372067 | DYKMR |
| 256686 | NSTAI | 310966 | QQQPV | 349375 | LEFSA | 372073 | DSDLE |
| 256689 | PGGGH | 310973 | PPQRE | 349378 | HGAPN | 372083 | TAEAE |
| 256707 | RESIL | 310978 | LRLQP | 349380 | TKGSP | 372086 | THRSR |
| 256722 | SFSEP | 310998 | NPFKD | 349391 | LVIDN | 372088 | GDAKD |
| 256733 | LPEKY | 311010 | QEDKL | 349393 | NQYLI | 372089 | KSSLV |
| 256759 | SILEW | 311028 | RGRRL | 349396 | RIKVE | 372090 | KGQKL |
| 256797 | GATGR | 311030 | AEVRL | 349401 | PYKCK | 372092 | VSVPK |
| 256832 | FEGVD | 311032 | LYFYH | 349402 | AENEF | 372093 | KQRQM |
| 256854 | QRCTP | 311034 | FNGRV | 349403 | VRERR | 372095 | ECYFR |
| 256857 | QLNQQ | 311035 | DLHTL | 349408 | EEHPL | 372100 | QGRTR |
| 256861 | VHEGQ | 311037 | GSLEI | 349413 | KHKED | 372101 | LLVCQ |
| 256897 | LVESL | 311038 | IQRKT | 349425 | LELSA | 372102 | KPNLK |
| 256906 | RSVSS | 311042 | EEEVA | 349428 | SKSTI | 372105 | DSSRY |
| 256925 | LVQSS | 311080 | LVLKQ | 349430 | YTSAK | 372112 | SASRF |
| 256935 | LSTDL | 311083 | KKPKK | 349433 | LWEGI | 372122 | IIHNA |
| 256951 | VLRKK | 311113 | DHMLA | 349434 | SAPHR | 372123 | PICCY |
| 256953 | TKISS | 311117 | KKYGI | 349436 | SSLYL | 372125 | RPGHF |
| 256958 | SETHC | 311121 | SKKSV | 349437 | DLLHI | 372126 | WAFCC |
| 256969 | SLLNW | 311122 | SPGAP | 349439 | ENRTD | 372135 | PAGRC |
| 256972 | GQSPQ | 311127 | AKGGA | 349440 | QSSHA | 372136 | WAFCC |
| 256991 | SESQV | 311131 | VIFPQ | 349446 | LNPPK | 372137 | ALGMD |
| 256996 | ARTRK | 311134 | DYEEL | 349449 | QNWWV | 372138 | TQREA |
| 256997 | GEDHA | 311135 | PTTVH | 349456 | SSPCG | 372147 | QSYNT |
| 256999 | LSEVA | 311151 | HGALI | 349459 | HDGKC | 372150 | LTKGF |
| 257013 | SCVLA | 311153 | PSSDF | 349465 | SWCDS | 372155 | LQARG |
| 257017 | TSCPC | 311165 | EMKPK | 349467 | MMTAK | 372156 | DEDVL |
| 257020 | DRWRH | 311179 | SDPCE | 349478 | IVEWH | 372160 | SSLIQ |
| 257068 | QADAL | 311181 | YCLLL | 349486 | GPVPS | 372163 | SQKSL |
| 257118 | MLKDS | 311183 | GRAAP | 349490 | QLGAR | 372165 | SQRPW |
| 257177 | GNVSE | 311184 | FLGLH | 349493 | ACTGC | 372170 | MYHLT |
| 257181 | RRGNE | 311196 | GEPTF | 349494 | EILQV | 372171 | WNESC |
| 257189 | CSRLI | 311202 | IVFKD | 349496 | TVISL | 372181 | MWVGY |
| 257192 | VQYSK | 311218 | AFKLK | 349503 | TIACS | 372183 | MLPGH |
| 257198 | TCIKK | 311219 | KIVSH | 349518 | TGKKH | 372186 | PAECS |
| 257209 | SELQL | 311221 | NLGYV | 349528 | ECGKA | 372191 | DGPDK |
| 257215 | VISAR | 311224 | IPSKV | 349529 | SQIPS | 372192 | PEMNK |
| 257245 | SSGPA | 311245 | AVKAT | 349531 | SLHGH | 372193 | SLAQT |
| 257248 | NFTQY | 311246 | KHSIL | 349534 | EKKKM | 372197 | KLASP |
| 257254 | TLVVD | 311257 | SVTSV | 349541 | KSDSD | 372198 | IQFSG |
| 257262 | VGIYV | 311270 | LRPIF | 349542 | SYSVS | 372199 | AASDA |
| 257264 | RWSKY | 311273 | CQLNS | 349543 | EVNAL | 372201 | ITLLG |
| 257267 | SEMEV | 311280 | EPHDI | 349546 | QIVQS | 372202 | LDCGI |
| 257287 | EHRNV | 311290 | SKSWN | 349547 | ACPLG | 372207 | DSSRY |
| 257290 | EDSFL | 311291 | AAGLI | 349550 | IGWNI | 372210 | SRART |
| 257302 | PRENR | 311300 | VSCPP | 349554 | SSHAN | 372218 | RVCSP |
| 257312 | DTSDV | 311304 | PRSGP | 349560 | QPCGC | 372220 | VDCRV |
| 257336 | YDGND | 311307 | SSEES | 349563 | KNERW | 372221 | KFCSP |
| 257347 | QKSAG | 311313 | NCVQM | 349569 | HKMSH | 372224 | LVAPS |
| 257359 | QLCPL | 311318 | DFVFL | 349571 | KPTAF | 372226 | LINTR |
| 257408 | KRVVS | 311319 | RRKAL | 349575 | ARMCH | 372229 | RGSHI |
| 257414 | NDACT | 311320 | KRHGF | 349576 | SQKLQ | 372232 | SQKSL |
| 257430 | LVTSV | 311330 | AQAGS | 349588 | EDNNE | 372233 | SLHSA |
| 257435 | YLHFF | 311336 | PKESQ | 349592 | RTYLP | 372234 | SQRPW |
| 257452 | IMNGH | 311343 | KKNKK | 349609 | MAGDR | 372235 | GLLIK |
| 257497 | LCGGN | 311344 | SQSTD | 349612 | KKHAK | 372239 | SQPPK |
| 257504 | RNHTL | 311360 | SEGEG | 349616 | EEDAL | 372243 | VSSDN |
| 257515 | RETVL | 311364 | GRVCP | 349629 | YQTRY | 372248 | LKKSR |
| 257548 | CKSEE | 311368 | HLYPL | 349640 | KITPQ | 372249 | SDLFL |
| 257549 | NRLPK | 311379 | PFFRN | 349648 | RIHSG | 372255 | GHRPP |
| 257552 | TNGYH | 311390 | SLCIT | 349651 | LPQPL | 372265 | LKETS |
| 257555 | ASSSQ | 311392 | EKLFK | 349658 | CSQAS | 372269 | GASSS |
| 257566 | RSASP | 311398 | LDKVV | 349669 | RRRLV | 372272 | FSAFY |
| 257570 | LFPAS | 311399 | KLCRI | 349677 | HDVYI | 372273 | LWCHI |
| 257572 | GRRNL | 311401 | KTGMT | 349683 | QVRIE | 372275 | SKKCH |
| 257575 | ESAGV | 311402 | MPMPV | 349687 | SLKGI | 372276 | GGVWI |
| 257600 | AAAKA | 311405 | GGPSS | 349689 | AEAEK | 372278 | SYSAR |
| 257604 | EEEEE | 311420 | GSPVL | 349693 | SVKTK | 372281 | PRKKF |
| 257626 | MLLGL | 311427 | MYDNL | 349705 | AAYFV | 372284 | YVYFL |
| 257627 | EMVHS | 311429 | QVHFK | 349708 | VKEKE | 372286 | QLPSK |
| 257632 | MGRWE | 311430 | KKPAA | 349709 | PLRTS | 372288 | LRRTC |
| 257637 | HDVGR | 311436 | ITLLK | 349713 | PASAS | 372291 | LHLYS |
| 257663 | FFVRD | 311447 | FAPDP | 349719 | CSVKM | 372293 | EGKWL |
| 257665 | HTRKK | 311449 | GGCSC | 349723 | QAERS | 372294 | SRSVR |
| 257694 | FFSKL | 311452 | RIHTH | 349727 | PCDRP | 372295 | SKKPV |
| 257696 | PSRSM | 311453 | RPPPE | 349732 | NAIHA | 372300 | QGPCL |
| 257700 | PNTGK | 311463 | GLGSS | 349734 | RIAAT | 372302 | GWEVR |
| 257704 | KYLLQ | 311477 | AKLLT | 349748 | KKPRF | 372305 | EHTLF |
| 257724 | ICFPS | 311479 | QPASP | 349757 | LQWWK | 372306 | LESTL |
| 257745 | GSGWH | 311486 | LLQRK | 349768 | DEVQI | 372310 | KAMNM |
| 257749 | RKDYT | 311489 | FKKNK | 349770 | PAGMQ | 372313 | ASTLA |
| 257766 | NAPEY | 311492 | CATST | 349781 | SRTKM | 372315 | FKIGM |
| 257770 | FVLYQ | 311493 | GDAEW | 349783 | KMVNS | 372316 | PSFCL |
| 257776 | HKDLD | 311496 | QSQVV | 349785 | PCNPL | 372319 | KIDEF |
| 257787 | ASYVS | 311500 | TQGST | 349790 | KGPDP | 372320 | STTRV |
| 257789 | TWGGC | 311502 | RRDYF | 349794 | RRRWT | 372322 | DEDTD |
| 257818 | INGMI | 311505 | GTKPP | 349796 | SEGKS | 372326 | TSQQL |
| 257821 | GEETK | 311508 | SQISS | 349802 | PACFL | 372328 | CVPLP |
| 257829 | LKRKK | 311513 | NSEQL | 349805 | TAVWV | 372331 | WPAGH |
| 257831 | RENEN | 311521 | SRQKP | 349808 | ALFVL | 372335 | MTNVS |
| 257836 | SLPSH | 311538 | GDEGS | 349823 | FTSPL | 372339 | SKLKT |
| 257857 | GYEVM | 311540 | TGERP | 349824 | PVTVL | 372342 | NDDKN |
| 257860 | SAHSY | 311545 | ASKTG | 349828 | KLVKD | 372353 | CSCSH |
| 257861 | EKGLF | 311550 | HHHRG | 349839 | AQVFE | 372354 | EITCF |
| 257863 | TLSPV | 311570 | CSRPT | 349841 | GPPLE | 372358 | RGARP |
| 257867 | LKPWA | 311572 | TIVKA | 349853 | SCPVG | 372368 | RSPKM |
| 257868 | RCGCS | 311579 | AEQKT | 349855 | VLLGV | 372377 | CADSF |
| 257894 | LTLDV | 311581 | SETVV | 349860 | SVTVE | 372381 | GLLPT |
| 257895 | AQAVY | 311592 | KVHGF | 349861 | RSIKV | 372382 | CADSF |
| 257899 | QSAPS | 311596 | TRENI | 349873 | KAKGK | 372385 | LNRSG |
| 257901 | SVRFA | 311605 | NPGRE | 349874 | SSLPA | 372389 | VFFLV |
| 257904 | EGNPE | 311609 | YLQYQ | 349877 | LKVPS | 372390 | PGHME |
| 257905 | GANSV | 311642 | ACQLT | 349882 | ALSTS | 372394 | VCTVR |
| 257909 | PQGSP | 311648 | EKKVK | 349883 | QWFTG | 372398 | SIHPA |
| 257910 | PSAFL | 311656 | HYSSL | 349884 | DVLKS | 372404 | RLREP |
| 257915 | HIILK | 311657 | VPGHR | 349887 | PPSAQ | 372408 | PRRRR |
| 257927 | EVHQT | 311665 | QLSDL | 349891 | SRKKI | 372410 | LYSGI |
| 257934 | PVSLR | 311677 | PSLLI | 349892 | NAHTF | 372412 | REITE |
| 257935 | GAVNV | 311679 | FHSAE | 349893 | KTTAL | 372414 | LNVKI |
| 257940 | TAMPH | 311682 | QNIFA | 349909 | PQLLK | 372420 | QDWKD |
| 257951 | CRTKY | 311684 | YPGGP | 349923 | PPVSR | 372422 | AVGDS |
| 257963 | EDVKI | 311687 | FIIHS | 349929 | EEEDS | 372424 | AFYGF |
| 257974 | PSHKH | 311688 | KISSL | 349930 | KFWGT | 372433 | GMECN |
| 257979 | NTQAL | 311695 | CSPDD | 349931 | SHCLC | 372445 | GSGSL |
| 257981 | EGTGV | 311697 | KFRFG | 349942 | GMVPK | 372456 | LRTLP |
| 258034 | DLYQE | 311698 | LAERE | 349945 | LDSVF | 372459 | QKLTA |
| 258042 | QEMAL | 311712 | FRSSV | 349954 | PILPQ | 372460 | LGYVK |
| 258052 | RTKEQ | 311713 | QLSIS | 349955 | IYSED | 372465 | YNAIS |
| 258070 | ETFGR | 311740 | AKPKV | 349957 | AGGAS | 372468 | GLLPT |
| 258080 | PEVTE | 311746 | VIRSN | 349959 | TSAES | 372475 | SQLLS |
| 258081 | AQEAD | 311747 | YQRRM | 349960 | HRKCF | 372476 | RFSRR |
| 258083 | PWTFW | 311750 | RLTQS | 349962 | EPAAA | 372477 | RFSRR |
| 258091 | RGRPH | 311760 | RDVIG | 349967 | HSTEV | 372479 | LYYVN |
| 258092 | SFASL | 311766 | GHPLL | 349971 | AEVAS | 372482 | KLRQK |
| 258105 | ADTGR | 311768 | ADVQA | 349977 | VPVLR | 372483 | PHVFI |
| 258106 | VTSND | 311775 | MWQEI | 349989 | KRTRS | 372490 | GRSWK |
| 258111 | KRKFS | 311778 | LFENN | 349996 | HFLGK | 372492 | TKKET |
| 258145 | SKHLL | 311792 | KKKRD | 349999 | FRCSP | 372501 | IITFQ |
| 258168 | GAPLT | 311803 | ARQAG | 350003 | LSIVF | 372503 | GANAH |
| 258169 | LKPQD | 311816 | AQGQE | 350005 | RLRSR | 372505 | QEEVD |
| 258180 | QMATE | 311825 | HPNEQ | 350009 | ETRSL | 372508 | TCFLR |
| 258198 | TENEA | 311827 | MRFDC | 350011 | LQLLS | 372510 | KAGGA |
| 258200 | PTLVA | 311833 | VLTHQ | 350012 | MYGRK | 372522 | LKYEK |
| 258201 | PGLEV | 311837 | YMYSS | 350014 | KIMTC | 372524 | ATKLG |
| 258214 | QIQVA | 311842 | HVVLS | 350017 | WGSRR | 372527 | CKTLY |
| 258229 | VSDEQ | 311847 | HVISS | 350018 | ASETN | 372528 | DIFFI |
| 258243 | KRYTA | 311856 | KKLDL | 350022 | GRQSS | 372531 | CHTDT |
| 258281 | ENQEH | 311862 | TQTAN | 350024 | FKALL | 372534 | PGCGD |
| 258301 | LFLVL | 311866 | HLKLY | 350028 | WRNEL | 372539 | LSDSD |
| 258302 | QRRLS | 311873 | RAIFQ | 350031 | SCSKG | 372541 | GGGAN |
| 258317 | LEAGS | 311876 | KPYSD | 350032 | QSTDE | 372542 | FEHAT |
| 258324 | SRFLS | 311888 | DPSWN | 350036 | HGESR | 372547 | HWTKL |
| 258341 | SIEKP | 311899 | CRIWR | 350037 | FRAGL | 372550 | ARALF |
| 258349 | PSSAP | 311921 | PLRLQ | 350041 | SKNFP | 372551 | APGKA |
| 258380 | TISRG | 311925 | VLKSC | 350042 | NLLTS | 372552 | DRFVR |
| 258381 | FWTLP | 311951 | KGKRK | 350049 | VIIQD | 372553 | ADLSE |
| 258383 | SITAS | 311957 | IYLEP | 350050 | HVKTD | 372554 | VSKKK |
| 258385 | DKRFI | 311962 | VLGAA | 350052 | LVIDN | 372556 | HKPNF |
| 258390 | SSAEV | 311977 | ANAYK | 350054 | SDLCR | 372557 | TKDPK |
| 258398 | LAVSP | 311984 | LQQAL | 350062 | SPVFA | 372558 | GGLFM |
| 258399 | TRQAL | 311990 | YCFVI | 350066 | LCEVW | 372559 | IAHLE |
| 258400 | QVSYV | 311997 | AAKGK | 350071 | AKVFV | 372563 | PHQLA |
| 258403 | MSTKL | 312001 | PTNMS | 350075 | EEWDD | 372565 | VCFMG |
| 258405 | QINKP | 312002 | RFAMP | 350085 | EKPYK | 372570 | ALLGP |
| 258411 | VSVCK | 312008 | EKKKR | 350092 | PPKPM | 372573 | LAIGR |
| 258412 | MGDRN | 312017 | AKKDG | 350094 | ASTMH | 372576 | CENDG |
| 258415 | LQRQC | 312021 | TLAKP | 350095 | NLHVP | 372582 | QRGSA |
| 258417 | NGYPV | 312027 | PNQYQ | 350098 | AEAME | 372585 | AQGTL |
| 258418 | AQQEA | 312029 | REAPF | 350102 | TVNLL | 372587 | SSVPR |
| 258424 | QQLAH | 312031 | GLLEK | 350103 | VFTEP | 372589 | MEGLL |
| 258428 | TLKVT | 312042 | WGPKR | 350107 | AKAIG | 372592 | PCSGD |
| 258436 | KLKSE | 312050 | ETNIA | 350111 | RRTRC | 372593 | GWHIS |
| 258439 | PAYTP | 312054 | QHETH | 350121 | KIMTC | 372595 | KFYDE |
| 258449 | PGTRT | 312059 | TNPFL | 350125 | CRIIS | 372596 | ADAPE |
| 258455 | TWKKR | 312066 | FGFRS | 350132 | IVMLL | 372597 | REANQ |
| 258456 | NQSAV | 312074 | IRLLA | 350136 | KLLVD | 372599 | KLAQL |
| 258457 | HVTWP | 312076 | KAERE | 350137 | FCILL | 372601 | HQGLL |
| 258459 | QVFES | 312081 | EEGEA | 350140 | ESKHN | 372602 | KGLLH |
| 258484 | AMEVT | 312082 | SIKQY | 350147 | DKLGQ | 372606 | ELKCR |
| 258494 | VTLEY | 312099 | RRIVE | 350159 | YGFGG | 372607 | TGFLS |
| 258499 | NEILS | 312107 | ELSEH | 350162 | RNANV | 372608 | RRGPL |
| 258526 | KCKWM | 312126 | SATLG | 350170 | LNGVS | 372611 | KKVEE |
| 258530 | AESEA | 312129 | PIMHM | 350175 | KGGKG | 372612 | LLKFI |
| 258531 | TPMES | 312134 | FICSY | 350178 | TTVGQ | 372614 | PTHTC |
| 258534 | INGDI | 312141 | SETIL | 350182 | EVPSS | 372617 | SDTSN |
| 258589 | NQNMQ | 312142 | CVVSQ | 350183 | EDDKC | 372622 | PQPPE |
| 258597 | GLCDR | 312143 | SPKKV | 350194 | AHLSH | 372626 | STGGP |
| 258603 | SVCPS | 312150 | SSFFC | 350195 | VTSGP | 372633 | WLLSI |
| 258613 | EKLVI | 312185 | VYDCN | 350198 | LQTSI | 372634 | PGGGG |
| 258646 | GAFKN | 312189 | VHSSS | 350199 | TILKN | 372635 | ENVVL |
| 258648 | SSESD | 312205 | YIFSV | 350202 | AVTSH | 372637 | EPWLS |
| 258654 | LLVSK | 312206 | QRYSR | 350204 | VSALS | 372640 | NYWDP |
| 258662 | KGNHL | 312208 | ISRSC | 350215 | CFPNS | 372645 | PAGGG |
| 258679 | ILDTL | 312213 | RNAKQ | 350216 | HLLDL | 372648 | QGCQV |
| 258682 | VAPLQ | 312222 | QLETD | 350220 | RRTEE | 372649 | RLFQE |
| 258704 | RARLS | 312224 | HLIEF | 350222 | SQGGK | 372650 | RLFQE |
| 258711 | NLLRD | 312235 | PRPDY | 350228 | IYTYP | 372651 | LHCVY |
| 258729 | QSRRK | 312242 | EDDRD | 350230 | ILATL | 372653 | RLPET |
| 258738 | AQSVQ | 312244 | PRAIY | 350236 | EQRPL | 372654 | VLSSV |
| 258739 | LSLPA | 312246 | TADLA | 350240 | GLQLE | 372657 | TPSPK |
| 258742 | ELLNV | 312250 | VHPHY | 350249 | AEDVI | 372658 | SLYTQ |
| 258743 | ALRQM | 312262 | SANGL | 350256 | GALSL | 372660 | LVDGF |
| 258749 | DQGGH | \|312272 | DNGWD | 350260 | SCTLQ | 372669 | KKRKK |
| 258761 | EGEEN | 312273 | IDLSA | 350261 | RTSTI | 372670 | VYGTL |
| 258767 | NRSKE | 312277 | ALNTN | 350263 | KSHFM | 372671 | KMPEN |
| 258770 | EELAK | 312284 | LLKVY | 350265 | FETTI | 372676 | IEEVD |
| 258772 | TAKPS | 312286 | KYCQS | 350266 | EKTVK | 372678 | QANRK |
| 258774 | IPALS | 312299 | KLGAP | 350267 | TSSYL | 372681 | LSDSD |
| 258775 | MELTM | 312304 | LLTEK | 350273 | FRCSP | 372683 | GGGAN |
| 258776 | CWFHK | 312309 | VLARP | 350275 | RGERA | 372684 | FEHAT |
| 258780 | VELIE | 312311 | FVSDL | 350278 | DFAAM | 372687 | GLASW |
| 258787 | LWPSR | 312318 | QQLQH | 350283 | PHSHY | 372689 | GMPMF |
| 258796 | SSGSH | 312323 | GGTFP | 350285 | DRVSF | 372691 | ARALF |
| 258798 | TKVSK | 312326 | GFSHN | 350295 | ETLQM | 372694 | APGKA |
| 258807 | RLHSY | 312350 | SRQPL | 350311 | VWRMH | 372695 | DRFVR |
| 258821 | RPQCE | 312355 | SSDIC | 350313 | PQPPE | 372696 | AWLQS |
| 258829 | VSWNW | 312356 | KKAKT | 350314 | TFIPI | 372697 | HKPNF |
| 258869 | TLLAL | 312367 | YEIVI | 350316 | LLFSR | 372699 | TKDPK |
| 258873 | QEQKM | 312368 | KEEDL | 350331 | YLSYN | 372700 | IAHLE |
| 258874 | DSSTA | 312370 | RQSPP | 350332 | VRGPQ | 372703 | PHQLA |
| 258883 | RVARR | 312381 | ASHPS | 350336 | IQFMP | 372706 | VCFMG |
| 258884 | ELPNS | 312385 | APLTR | 350352 | GPGID | 372711 | AQGTL |
| 258886 | ARKFS | 312397 | IHKSL | 350358 | QGGFI | 372713 | SSVPR |
| 258888 | AQGMR | 312399 | KKVTM | 350359 | LNPIL | 372717 | PCSGD |
| 258930 | FHIRI | 312402 | PWGGH | 350364 | NAILQ | 372718 | GWHIS |
| 258947 | FCHSL | 312403 | GRDSG | 350369 | TDARS | 372720 | ERKSS |
| 258955 | PVPGG | 312411 | SYKIE | 350377 | KRSAL | 372721 | KFYDE |
| 258960 | GLVLQ | 312415 | QEDDE | 350386 | EESSE | 372722 | ADAPE |
| 258962 | SRSRT | 312419 | VAQQQ | 350387 | FTWTL | 372723 | REANQ |
| 258963 | TSPPW | 312435 | PYVPP | 350389 | TFFNI | 372726 | KLAQL |
| 258969 | KAGRH | 312436 | MEATD | 350392 | MELTF | 372734 | KGLLH |
| 258975 | YDNIE | 312439 | LNVYL | 350402 | VSGKV | 372735 | ELSNN |
| 258991 | AADQP | 312442 | VESWQ | 350408 | HSKET | 372738 | HQGPL |
| 259006 | GTKTA | 312455 | ILSYT | 350409 | KYRVK | 372741 | FADDP |
| 259008 | FPGFK | 312458 | KSQDF | 350415 | TDLQI | 372746 | RRGPL |
| 259021 | PPKGT | 312464 | KAHES | 350418 | CAGEK | 372751 | GEGKK |
| 259030 | CFTSE | 312470 | VLHTI | 350420 | LYQVD | 372752 | PTHTC |
| 259034 | ERKCP | 312506 | GQYWV | 350422 | QFVLA | 372754 | LPPPR |
| 259037 | ATPDN | 312530 | LQQKD | 350425 | APLES | 372757 | SDTSN |
| 259043 | SPRRY | 312535 | EESVV | 350444 | IRINP | 372760 | IPRTK |
| 259050 | TFDIA | 312550 | YEVSI | 350451 | KFRPY | 372767 | STGGP |
| 259053 | PVQFD | 312576 | IAANS | 350467 | SAEPC | 372771 | ISELP |
| 259055 | SMMHL | 312599 | HKDDK | 350469 | SAKKL | 372773 | PVPGG |
| 259056 | KYYEA | 312606 | FNDPY | 350474 | VLVGK | 372776 | WLLSI |
| 259060 | IQSQI | 312615 | PYFEK | 350479 | SGKKA | 372779 | IKAEI |
| 259075 | FNGET | 312617 | QVTGD | 350482 | ENLGG | 372782 | PGGGG |
| 259089 | YELQP | 312618 | LDRTC | 350491 | LKRDF | 372783 | ENKPT |
| 259119 | KTAKE | 312624 | EAQRG | 350498 | LGLQA | 372785 | GVNHR |
| 259154 | QEYSL | 312625 | FRVKK | 350502 | SYSVS | 372787 | AVMVG |
| 259199 | DQVCT | 312631 | VRPAC | 350504 | ERERL | 372789 | EPWLS |
| 259205 | LNIND | 312649 | QQSLH | 350511 | TGRWK | 372790 | GIIAL |
| 259206 | FQEDE | 312652 | LSPGC | 350512 | QINIS | 372791 | GAFAL |
| 259211 | LTMLF | 312663 | IARAD | 350524 | LIELH | 372795 | NYWDP |
| 259212 | FQQCD | 312664 | GHPPT | 350525 | ARRLR | 372797 | SDSED |
| 259216 | LGHRL | 312671 | RCVLS | 350540 | NVNDE | 372798 | AEALK |
| 259229 | EPGAA | 312673 | GSCGF | 350541 | LRRNT | 372801 | YRISA |
| 259235 | RKEKV | 312675 | EGAEA | 350546 | FNAQV | 372805 | IEQTR |
| 259239 | FLSTE | 312678 | TEQLP | 350547 | DETSI | 372808 | LGGGA |
| 259241 | IIEKW | 312679 | QQHVV | 350549 | LLRPV | 372810 | KGTLL |
| 259250 | MWQEI | 312697 | KAKKP | 350552 | TGWAK | 372812 | PGQSQ |
| 259253 | KREEL | 312700 | PRLQC | 350556 | GRRTF | 372815 | QGCQV |
| 259254 | KEYFI | 312702 | EDDMF | 350558 | SSAYC | 372816 | VSLTA |
| 259271 | LGQDL | 312706 | QHPTT | 350576 | HEMTH | 372817 | RLPET |
| 259289 | TCEIQ | 312709 | SLLEK | 350580 | YTSSK | 372820 | TPSPK |
| 259324 | DKEQA | 312716 | CIALW | 350583 | LQEYL | 372821 | SSSTL |
| 259339 | RLDFH | 312734 | RCSLL | 350592 | REGEE | 372825 | PMHSN |
| 259351 | LMSFE | 312735 | RMMSV | 350607 | EVLLC | 372826 | PCLCL |
| 259357 | NTLGG | 312742 | PTREA | 350611 | EIDMA | 372827 | SLYTQ |
| 259362 | RFFSK | 312753 | EQDRP | 350614 | AQTRL | 372829 | AGIQT |
| 259365 | CRSGV | 312758 | WSQQA | 350626 | KSAGG | 372832 | PQMSS |
| 259396 | EEGES | 312767 | FQNIC | 350630 | LHMKK | 372834 | LVDGF |
| 259400 | DKKCS | 312770 | VHEVF | 350633 | PGPGR | 372835 | LSSLI |
| 259406 | MSPPL | 312773 | GSLDG | 350638 | FWLLP | 372836 | REEYR |
| 259410 | VLPPH | 312774 | PPRLL | 350639 | GCNNQ | 372837 | AGMRR |
| 259455 | MVSGL | 312778 | IGLKP | 350642 | HVQEH | 372839 | RLQWG |
| 259456 | SYVLF | 312779 | AALPQ | 350649 | RTLAP | 372840 | DLGFL |
| 259457 | TMDTS | 312789 | TAASS | 350665 | HKKTH | 372842 | RNSGP |
| 259466 | HRIYS | 312814 | RGSRM | 350667 | ELNNM | 372845 | VVCNT |
| 259467 | DLEID | 312834 | RLGES | 350676 | GKLLL | 372849 | QKHSS |
| 259469 | YAVKA | 312836 | KLDLA | 350681 | DLQKT | 372853 | NFLPL |
| 259470 | SYPNV | 312837 | LEIKH | 350686 | ELAAL | 372856 | EVGPV |
| 259477 | ARKTV | 312864 | HNDWF | 350691 | LSSYF | 372857 | LQNHL |
| 259486 | YESEI | 312939 | ADKTA | 350696 | KRKGL | 372860 | GSPEL |
| 259512 | RLGDQ | 312942 | GDERI | 350698 | KRKGR | 372868 | ALNTV |
| 259526 | TRGKM | 312946 | ILTVK | 350704 | FFLEE | 372870 | KKRKK |
| 259555 | LRRKD | 312952 | LNRHR | 350708 | NFDED | 372871 | HPAAF |
| 259569 | LLNFA | 312970 | GGTNK | 350710 | KSMLQ | 372873 | PLRTA |
| 259605 | HRDSE | 312981 | NQQGA | 350716 | SGPWL | 372874 | KMPEN |
| 259607 | TPKGP | 312988 | DPRPV | 350718 | VLLPS | 372879 | EMSST |
| 259608 | QPAAS | 312995 | KYLES | 350719 | GPPPT | 372881 | IEEVD |
| 259631 | LRKMG | 312999 | DCGLF | 350720 | GSEED | 372883 | LQQKQ |
| 259632 | KPAEE | 313007 | GVPTV | 350734 | GLSSG | 372890 | DGEAE |
| 259633 | FRFPD | 313018 | IALTN | 350736 | ALGLP | 372894 | ESCRR |
| 259667 | QWPPG | 313021 | YGGHR | 350750 | YTSFD | 372896 | AKALK |
| 259698 | VATAF | 313025 | GGLAL | 350767 | YGFGG | 372899 | REELG |
| 259708 | LSSSS | 313026 | FGTQA | 350773 | QPMET | 372900 | SQHNP |
| 259711 | VLCCQ | 313029 | IRDLL | 350776 | LGDSM | 372901 | TRPHS |
| 259726 | LLDSP | 313034 | ASQRR | 350780 | LILYF | 372905 | LWLLH |
| 259727 | NTVFS | 313046 | LQTEV | 350785 | SVVSR | 372908 | LCSKP |
| 259737 | TLQSH | 313049 | ALLNV | 350786 | EDFAC | 372909 | SEITE |
| 259748 | TDLPL | 313050 | TSPLQ | 350787 | FFSHR | 372914 | MPWHL |
| 259750 | RAGAR | 313055 | VGEKP | 350789 | EQFAN | 372916 | STRPW |
| 259782 | SSDEP | 313059 | NLRTT | 350809 | TIASH | 372917 | GLYTP |
| 259791 | KAKGK | 313062 | ADVFL | 350818 | SRRKT | 372920 | PQSAL |
| 259803 | LCPLR | 313079 | PAVTV | 350820 | ISTQT | 372922 | GPPLP |
| 259806 | KPCVM | 313088 | NTTRV | 350823 | KDRTK | 372926 | MNLEF |
| 259808 | YVSQN | 313104 | GRRQI | 350833 | NPQGS | 372929 | SRPRE |
| 259818 | GEDEA | 313110 | EKAVK | 350835 | VEEKK | 372930 | ELSNN |
| 259845 | REEYR | 313121 | VTSWM | 350836 | SFLKE | 372935 | NGPPL |
| 259870 | RLQWG | 313140 | LQWLF | 350844 | AYDRH | 372942 | GEDEC |
| 259873 | PQSAL | 313158 | VLLGI | 350848 | PQSIV | 372943 | ESHSL |
| 259881 | LSSLI | 313159 | AEEEY | 350852 | RRRLH | 372945 | GSSNQ |
| 259882 | EMSST | 313169 | RKNAV | 350856 | VCAEV | 372947 | LPPPR |
| 259883 | AHLSD | 313171 | AADFP | 350864 | EEMSG | 372951 | PTDWE |
| 259895 | QKHSS | 313172 | VHQLP | 350870 | SGKWE | 372953 | YRWGN |
| 259915 | PMHSN | 313199 | SYKPY | 350873 | LWEEP | 372955 | RPYSQ |
| 259925 | AEEEA | 313214 | GMYGR | 350874 | VLKPV | 372957 | LLLRP |
| 259930 | LTLKG | 313225 | QLSLE | 350878 | GIFCN | 372959 | DKKHT |
| 259938 | GRSKQ | 313226 | DYALV | 350881 | MAVES | 372962 | PPQKL |
| 259939 | DPSTT | 313243 | EELKE | 350882 | SLFVN | 372963 | KVPSS |
| 259951 | IKIFD | 313262 | GGSCL | 350885 | SLHGH | 372966 | ISELP |
| 259953 | DGEAE | 313272 | KTSGH | 350894 | MRDEL | 372967 | VPAES |
| 259963 | RNGVR | 313280 | EHFQL | 350896 | PAPQY | 372969 | PVPGG |
| 259969 | MKTKK | 313287 | YGFVS | 350897 | LRLCT | 372971 | EKEDS |
| 259983 | DETPK | 313299 | VEMLG | 350906 | IRQGH | 372978 | ENKPT |
| 259988 | QDTSC | 313309 | LTPLL | 350914 | MIYIR | 372979 | ITCKA |
| 259989 | SFFRG | 313311 | FFQFG | 350928 | LGQDL | 372982 | VHSLR |
| 260008 | NPLRK | 313316 | LFGNP | 350934 | DIKDT | 372984 | AVMVG |
| 260010 | AAIKS | 313318 | SAMGV | 350937 | KKRMS | 372987 | TREPL |
| 260011 | LVHLV | 313324 | RYPLI | 350939 | PSQRA | 372988 | GIIAL |
| 260045 | TVENT | 313346 | PAQEN | 350945 | FISRV | 372990 | TACKV |
| 260054 | YRFWK | 313350 | KQSED | 350946 | YLNKI | 372991 | GAFAL |
| 260056 | CCNFN | 313355 | SFSST | 350951 | GQRQL | 372995 | YRISA |
| 260058 | SSLKM | 313360 | EHGEN | 350958 | QKPIL | 373000 | IEQTR |
| 260061 | QQYKA | 313363 | GKLSV | 350961 | AYRVV | 373001 | MWCMY |
| 260102 | KYYTS | 313377 | LLKIP | 350964 | FSQED | 373002 | RTVYS |
| 260113 | LYWFK | 313380 | GLYTP | 350967 | NKCAL | 373003 | RGSHL |
| 260116 | SESIQ | 313384 | TFFSL | 350969 | QVSLQ | 373004 | LGGGA |
| 260118 | CYIFD | 313385 | RSGTE | 350975 | WDVDG | 373005 | DCGQL |
| 260126 | LEPPS | 313391 | GNPFA | 350976 | SPAFF | 373006 | STEGA |
| 260128 | DGWEG | 313396 | GRFLC | 350990 | KKKKV | 373008 | IKIFD |
| 260129 | PASET | 313399 | TVYFW | 350991 | IRINP | 373009 | ILKHK |
| 260130 | TIPEV | 313408 | DEQDA | 350992 | TLLES | 373015 | KITVW |
| 260147 | QHTEV | 313416 | EDCDT | 351007 | DHFDK | 373016 | PMHSN |
| 260187 | PPSRM | 313419 | TWSTR | 351015 | IKKIV | 373018 | AGIQT |
| 260191 | LWGGV | 313420 | WEPWM | 351028 | SLSPT | 373022 | REEYR |
| 260197 | PMVIA | 313423 | LPALL | 351035 | KMKAQ | 373023 | LLDSP |
| 260210 | SVEDM | 313437 | TTFEY | 351040 | TYKLK | 373024 | RLQWG |
| 260227 | NSRKK | 313441 | AFTPG | 351042 | ETLQM | 373027 | RNSGP |
| 260228 | SWIGC | 313443 | HTINI | 351047 | ELLNA | 373031 | VVCNT |
| 260229 | TSIYQ | 313444 | FLMPA | 351049 | QNRTR | 373034 | HLLYK |
| 260246 | VGDMS | 313454 | SHDTD | 351052 | SLCSC | 373037 | GSPEL |
| 260247 | VRQTS | 313474 | HNVKI | 351056 | DQFLQ | 373038 | GLTQS |
| 260257 | YVIPR | 313490 | LEGSC | 351059 | ALLLL | 373039 | YCIGG |
| 260264 | STYLH | 313500 | CGTSS | 351068 | QRINR | 373041 | VDVET |
| 260270 | VGKTS | 313504 | PCLIS | 351075 | WGAQP | 373042 | SWRAA |
| 260276 | SYSKP | 313508 | ADWLR | 351076 | GRLNW | 373043 | TETLD |
| 260282 | QKAEN | 313510 | LMSCL | 351086 | PDCPG | 373047 | VIRRL |
| 260283 | LTKDI | 313513 | EPAEG | 351100 | GDDSD | 373048 | WQQHH |
| 260309 | LFPGH | 313515 | AVRNP | 351104 | RQRSK | 373054 | HPAAF |
| 260323 | TEESA | 313516 | EADWS | 351105 | SRSGK | 373056 | PLRTA |
| 260324 | HLGMS | 313529 | ILSLV | 351106 | TRVTH | 373057 | FLAQK |
| 260327 | LLPPD | 313553 | AGKTV | 351108 | NYKPY | 373058 | AEEEA |
| 260356 | ECRDP | 313569 | VGGVH | 351114 | LRWGS | 373060 | EMSST |
| 260359 | ILAED | 313571 | SVRIF | 351118 | DDSYI | 373065 | DGEAE |
| 260361 | PRLFK | 313572 | FCSIL | 351126 | TGKKK | 373066 | KCISG |
| 260363 | KRKKP | 313580 | CDPAL | 351132 | LLKQR | 373067 | ESCRR |
| 260372 | TINAK | 313581 | IAANP | 351137 | SLKED | 373071 | REELG |
| 260382 | ITDQK | 313582 | RVHTD | 351138 | LGELQ | 373073 | QALQL |
| 260385 | VILRD | 313600 | SSLTI | 351141 | QGSVL | 373075 | LCSKP |
| 260386 | SLAER | 313601 | QRLRR | 351143 | PFFPS | 373079 | STRPW |
| 260402 | QESRL | 313623 | IFNIF | 351147 | CYSYS | 373080 | GPPLP |
| 260403 | SHLSS | 313643 | EGHHV | 351148 | VSPMH | 373082 | SRPRE |
| 260404 | QTSTC | 313644 | SLLSW | 351149 | NKDVA | 373086 | NGPPL |
| 260408 | GHMRR | 313657 | YINII | 351154 | ECDGL | 373090 | GEDEC |
| 260433 | RCLEH | 313661 | FRKAS | 351157 | QEHVE | 373091 | ESHSL |
| 260435 | EKERS | 313666 | FQKYH | 351163 | VCFLG | 373096 | PTDWE |
| 260442 | WTRLL | 313668 | ARSLS | 351164 | ASLWA | 373102 | LLLRP |
| 260443 | MEDAP | 313670 | SRELW | 351167 | QAGEV | 373105 | PPQKL |
| 260447 | CLHKE | 313681 | PEEPL | 351168 | EWVCI | 373106 | VPAES |
| 260453 | ICEEK | 313691 | ENKQN | 351182 | YIKGF | 373107 | GPMQH |
| 260502 | KQAEL | 313699 | PTDAL | 351190 | FLKRP | 373108 | EKEDS |
| 260505 | RYGHL | 313704 | PALYF | 351197 | SETSL | 373111 | TREPL |
| 260508 | SVQKS | 313731 | RIQRS | 351206 | LEGVD | 373114 | TACKV |
| 260526 | IPQFV | 313738 | IDSEV | 351207 | YENQV | 373119 | MWCMY |
| 260536 | IRRMN | 313744 | TGGVY | 351209 | VGIPI | 373120 | RGSHL |
| 260563 | TNPNL | 313752 | GGRDS | 351211 | SKRPF | 373123 | IKIFD |
| 260570 | SFSFQ | 313759 | LASSC | 351214 | SLLWG | 373124 | ILKHK |
| 260595 | ENDEI | 313764 | NSHGL | 351218 | PGHVD | 373129 | KITVW |
| 260598 | FDGIV | 313775 | LNLTL | 351228 | TRELT | 373134 | HLLYK |
| 260600 | VVDNS | 313809 | HFQEP | 351238 | CGQLE | 373136 | GLTQS |
| 260604 | SSNSQ | 313811 | ETRAV | 351244 | DFRKM | 373137 | YCIGG |
| 260605 | IELDS | 313816 | EVLQE | 351245 | LKNGT | 373139 | VDVET |
| 260619 | HSSGL | 313822 | SSSLH | 351248 | SVKWN | 373140 | SWRAA |
| 260630 | KETCQ | 313823 | RTGWS | 351249 | STGEK | 373141 | TETLD |
| 260637 | SYCQG | 313829 | PYGRY | 351250 | PVHIK | 373143 | VPMEI |
| 260643 | FPGFL | 313833 | SKEAP | 351254 | RRAEM | 373147 | LMGWE |
| 260645 | HLISR | 313852 | PRRRR | 351255 | PYSAE | 373148 | WEWGK |
| 260648 | KYLKF | 313854 | APHTD | 351258 | GDNQE | 373149 | FFCKK |
| 260649 | LYTSC | 313859 | RSQEP | 351268 | WKMVP | 373150 | RNCKS |
| 260653 | SECDV | 313869 | ISTTE | 351273 | VFPSD | 373151 | ILTSA |
| 260662 | MSLVS | 313873 | LTIGA | 351280 | RDRPG | 373152 | FLAQK |
| 260665 | RENSS | 313875 | AEQRG | 351283 | LTLKG | 373153 | HKKFE |
| 260682 | CFIPV | 313877 | AAETE | 351284 | KYDPS | 373156 | ITFTA |
| 260702 | RNNLI | 313880 | AEEGD | 351292 | RSPYK | 373169 | KILSC |
| 260731 | AQINL | 313881 | FNLIL | 351298 | PPKKR | 373184 | CHCSS |
| 260742 | HKWKS | 313886 | KWVCW | 351310 | AANWS | 373191 | EKGPE |
| 260743 | ALLPS | 313890 | VRDTA | 351314 | AMEVE | 373193 | ILMKK |
| 260746 | NAKKK | 313921 | VGIKK | 351318 | SSSFA | 373194 | SPLAT |
| 260762 | MSQHM | 313933 | SILEC | 351320 | PIDST | 373195 | VKVSY |
| 260803 | DDDAA | 313936 | WLPRV | 351325 | LPEGV | 373197 | IIPKI |
| 260810 | RPRVH | 313947 | STHLR | 351327 | LLANL | 373200 | KEYFI |
| 260818 | LGYQT | 313950 | LQSVA | 351335 | RRFSV | 373203 | RSSYR |
| 260843 | DYTDV | 313953 | FRNQY | 351342 | HQSPE | 373206 | KHDEL |
| 260867 | LQQSL | 313967 | PDMEA | 351345 | LCSQT | 373214 | DEEDD |
| 260869 | IKGSR | 313973 | VKNCS | 351346 | RKGFP | 373226 | EGIWA |
| 260926 | EIDQR | 313983 | EEVKE | 351348 | NLLTL | 373228 | GALGF |
| 260947 | LPLDS | 314004 | PKNCS | 351352 | TIDMS | 373233 | KGLQP |
| 260950 | RCGCS | 314011 | KNFPV | 351361 | LRLCT | 373239 | LEDTE |
| 260952 | KETKL | 314018 | DQSTV | 351363 | SEWII | 373244 | QNNLT |
| 260953 | IRFSF | 314029 | CKLTV | 351375 | LLEEL | 373249 | PHKQQ |
| 260956 | GAGDQ | 314030 | QCAHQ | 351379 | RMQGA | 373253 | PCIAL |
| 260967 | FSKCW | 314032 | GQTNG | 351380 | MTAVA | 373254 | DRRKA |
| 260968 | FIPLK | 314036 | QKLND | 351384 | QVFES | 373257 | QAPPP |
| 260970 | EDKSG | 314040 | NNHLL | 351390 | MFEKD | 373261 | AELNF |
| 260983 | TFGLE | 314042 | SRLGP | 351391 | SIMHI | 373265 | ISLQD |
| 260985 | AQAKL | 314048 | QHTNV | 351392 | NITII | 373272 | RILVF |
| 260988 | VMDLY | 314067 | MKSNR | 351395 | KSWWK | 373273 | AGYWD |
| 261006 | KQDYH | 314073 | RRIQQ | 351401 | ADDPV | 373274 | TGEKP |
| 261007 | LNQQG | 314077 | SQLLS | 351409 | DSKPY | 373278 | LMSEF |
| 261015 | SHVGA | 314080 | RFSPT | 351410 | VSLSV | 373282 | HATRN |
| 261024 | NTSVV | 314093 | FVRNP | 351411 | EEERE | 373283 | FKVHP |
| 261034 | DEDTF | 314099 | SQATP | 351416 | MNQLG | 373287 | DSETY |
| 261037 | LLYPM | 314103 | GEPGR | 351424 | CVLVA | 373288 | LYERD |
| 261038 | VVVSV | 314105 | CLYLA | 351425 | ASFSF | 373290 | TSVGF |
| 261047 | KVKMK | 314116 | KKKPF | 351430 | SYCIR | 373298 | CRYFT |
| 261058 | EVTRL | 314124 | AARTS | 351432 | CFMPN | 373300 | LDPKS |
| 261070 | LGFKI | 314126 | GGRRR | 351446 | WKSDC | 373301 | MVQIG |
| 261167 | MEGLL | 314132 | LLPER | 351455 | EKNIG | 373304 | YKQVT |
| 261168 | STQSS | 314151 | IVANP | 351473 | IFHYI | 373312 | QQNEQ |
| 261169 | APQVR | 314153 | IPESY | 351475 | RLLTS | 373319 | GDLSA |
| 261170 | ESTYF | 314156 | GEANN | 351480 | GAGVS | 373331 | GLRLQ |
| 261172 | VGSLV | 314163 | GHCAR | 351482 | RHGEV | 373332 | LVSCT |
| 261173 | LETSL | 314171 | RELMA | 351483 | SNYRT | 373340 | TSDSD |
| 261177 | QRHFY | 314173 | NSIQI | 351486 | LDVLG | 373343 | APEQP |
| 261180 | KALRH | 314193 | WIAAL | 351490 | RMEAS | 373345 | RELQS |
| 261182 | ECKQQ | 314196 | KHKCN | 351492 | ELYYQ | 373347 | KSGTM |
| 261183 | NFMFK | 314197 | LSGGL | 351503 | VTLVA | 373354 | GSYFD |
| 261187 | RETNI | 314223 | AGQHW | 351506 | PPKDR | 373360 | SRLPR |
| 261191 | KASRQ | 314228 | LPFFR | 351509 | NIGSL | 373397 | EKKAL |
| 261192 | TIVLS | 314231 | LLRNM | 351519 | WEWGK | 373399 | EAHTE |
| 261195 | GEYKN | 314299 | TCAKR | 351520 | APGTL | 373404 | ASAQS |
| 261196 | NAAAN | 314309 | IDMPD | 351524 | YSYFK | 373411 | SNSEN |
| 261197 | LQPTS | 314311 | FSEYD | 351530 | SSFLV | 373413 | NLCLT |
| 261200 | VRADM | 314324 | ASDAN | 351536 | HHPAV | 373414 | YEKNI |
| 261203 | QNHMS | 314331 | QVRIE | 351539 | QELWK | 373420 | SSNLP |
| 261205 | LAVKK | 314343 | PGGTL | 351541 | LETAQ | 373426 | CLVAR |
| 261206 | MLKQA | 314348 | LRSQS | 351543 | AVATT | 373427 | LRARK |
| 261207 | SKLSK | 314365 | LTWLL | 351552 | SATWK | 373433 | ARCYS |
| 261208 | ESEDL | 314380 | GRAKE | 351559 | YANFK | 373441 | LSKVE |
| 261211 | QSMLF | 314396 | ITVKQ | 351568 | GLSRT | 373454 | ESGGF |
| 261214 | RHMLV | 314398 | VEPLG | 351569 | PCFQR | 373463 | VETSL |
| 261226 | MIIPR | 314400 | GDGDH | 351575 | VDETE | 373476 | LQRQY |
| 261233 | QYKKE | 314401 | RVHEN | 351589 | KAKGK | 373477 | GVKRK |
| 261234 | MNNKS | 314407 | RAAFQ | 351591 | STTRV | 373479 | EUPSN |
| 261244 | GADTF | 314414 | SILKN | 351593 | RGKNV | 373480 | NLKRL |
| 261245 | FWQPS | 314418 | LLYSH | 351595 | LPKCL | 373481 | GPSCA |
| 261247 | GANGH | 314420 | GNCTS | 351596 | RLSSQ | 373484 | LCHLH |
| 261249 | IVSNT | 314440 | SLPRV | 351598 | HSEIL | 373485 | PEPAS |
| 261250 | LTSKH | 314444 | HSPVG | 351602 | SWFER | 373487 | KVLRH |
| 261254 | RDIDL | 314458 | KCCIF | 351605 | CHSDT | 373490 | TYLNN |
| 261263 | CCSSG | 314463 | ESRRP | 351608 | LGVYK | 373509 | KKYLS |
| 261266 | HRGPV | 314477 | LVSCL | 351618 | MTAAV | 373518 | FQENF |
| 261267 | QGCGV | 314480 | ELDMD | 351625 | HATVI | 373522 | KIAAF |
| 261275 | VLDQV | 314487 | SATHW | 351627 | LVPTS | 373534 | PLLQP |
| 261292 | TVELP | 314488 | QRFLI | 351631 | ILTSP | 373536 | LSSAK |
| 261296 | EPFPV | 314491 | DVDFF | 351632 | PPKPF | 373538 | PNYFI |
| 261302 | ETTKN | 314498 | CMKSL | 351642 | AAHTV | 373539 | PLRTL |
| 261303 | EGLYL | 314499 | SRPLF | 351644 | FCVGK | 373555 | EMGKR |
| 261304 | VEATR | 314500 | DMVSS | 351646 | LIAIR | 373562 | RISLR |
| 261308 | NITVK | 314501 | TSAKE | 351650 | MSGIR | 373565 | FKSKK |
| 261312 | GFHLN | 314505 | MRKKS | 351653 | KNPTK | 373566 | KMLLK |
| 261313 | QLSGK | 314508 | LWRRQ | 351657 | VNYLV | 373567 | GAHSV |
| 261318 | ELFPA | 314510 | NWLVW | 351659 | MDSTL | 373570 | NQSVV |
| 261326 | QDVTS | 314518 | AQQET | 351664 | TGAQG | 373572 | EGTEV |
| 261332 | NVVKV | 314520 | MLTDV | 351669 | QLPVS | 373575 | KTTLD |
| 261336 | EHGNV | 314528 | LPREG | 351671 | KVKNM | 373583 | ISPLH |
| 261340 | VCLFE | 314543 | FSHAK | 351673 | PLLDR | 373586 | GGEES |
| 261349 | CTDSS | 314544 | IFFLD | 351674 | LSLKT | 373588 | YGSGH |
| 261353 | PSDNS | 314556 | QGLVC | 351682 | MAQLH | 373592 | PDLGF |
| 261359 | SDFQL | 314560 | RILNV | 351686 | HITKP | 373594 | RVPEA |
| 261364 | SIEVD | 314566 | KQEQP | 351689 | FYKCE | 373596 | TQDSK |
| 261366 | SCAIM | 314575 | RRLSP | 351695 | TLTPC | 373601 | LQQIK |
| 261367 | KELFL | 314606 | LHNEL | 351697 | LLDQF | 373602 | FVDTC |
| 261374 | DFRWE | 314608 | SQIEC | 351703 | TDEDD | 373622 | SPKTN |
| 261377 | PGLCS | 314615 | DNQNW | 351706 | ISGVP | 373627 | KHRKK |
| 261381 | DGRLR | 314620 | NDSSP | 351707 | ILSTT | 373640 | SGISM |
| 261383 | CQLDN | 314624 | QSGGR | 351716 | KLEKR | 373648 | SNKPI |
| 261386 | CEPHF | 314625 | SWQQW | 351723 | KMKPK | 373657 | SEAES |
| 261396 | VQGQI | 314649 | CYGGL | 351727 | QDFNC | 373658 | VKAYS |
| 261401 | AKIAA | 314667 | RETAS | 351731 | YIGWC | 373669 | EALCK |
| 261402 | CSKLN | 314694 | GWSCR | 351732 | QRPPH | 373682 | QRFLD |
| 261405 | RKCSK | 314709 | EAGQA | 351737 | TIHEE | 373684 | KAGKL |
| 261406 | VWGVI | 314724 | EDSNV | 351740 | LKAQP | 373692 | IKKRL |
| 261407 | LKKME | 314754 | RQRSK | 351741 | SRKKI | 373694 | STAHG |
| 261413 | AKASA | 314768 | NKVAA | 351755 | DHSVV | 373696 | SFHLS |
| 261416 | NHENM | 314774 | WRPWP | 351760 | RQRSK | 373700 | NQPGP |
| 261427 | LLLSN | 314775 | MYTCS | 351766 | LSPRP | 373702 | YQLLT |
| 261434 | KTKDL | 314776 | SRTSP | 351769 | PLEGW | 373712 | LHPRG |
| 261435 | KVMLK | 314783 | TMKRN | 351777 | DDLYG | 373713 | KEKID |
| 261438 | RHMLV | 314806 | FLFDL | 351781 | EKAAC | 373715 | KILDL |
| 261439 | EPTGD | 314807 | DFYIL | 351783 | LPVYR | 373718 | GPNCA |
| 261441 | STTSV | 314810 | EPIGN | 351787 | VLLPK | 373722 | ELKSA |
| 261448 | DDDDE | 314813 | GEEEE | 351789 | QGPLD | 373726 | IHIAY |
| 261455 | TSHIS | 314827 | PGVLT | 351793 | FYCQN | 373752 | FFFPF |
| 261461 | NTSAE | 314829 | FHISL | 351807 | GRKRK | 373765 | NISSC |
| 261464 | DLEDL | 314831 | QEPLD | 351811 | TPSLP | 373767 | LRRYP |
| 261465 | RFINK | 314835 | ASYLL | 351813 | EQEEA | 373770 | LDMMS |
| 261475 | DLDDT | 314837 | SSLVG | 351834 | STIKP | 373773 | MRMPL |
| 261479 | LAERD | 314846 | SLCLF | 351857 | QDASS | 373783 | QLSPQ |
| 261483 | RIQLR | 314853 | RQVRG | 351868 | PPRCL | 373785 | YLVSC |
| 261486 | LKTET | 314854 | YCFDI | 351881 | RIQAI | 373786 | PIFHH |
| 261488 | GIKTT | 314897 | RPADF | 351883 | ETTSQ | 373808 | KAKLT |
| 261497 | FLEYE | 314901 | SYYMW | 351893 | FQIFI | 373827 | EVQRK |
| 261499 | QSFPQ | 314910 | GGEEI | 351894 | RRKSK | 373828 | QPGAG |
| 261503 | KYFET | 314914 | AEPHL | 351896 | FGPGS | 373846 | RETFF |
| 261507 | EKKTE | 314929 | QARQN | 351905 | LNTTK | 373848 | LCRLS |
| 261509 | YISRH | 314946 | VVGPY | 351926 | LAQQF | 373853 | QETQI |
| 261510 | ETLNF | 314949 | SDEEN | 351929 | LNSER | 373859 | TLDFK |
| 261511 | DQLAA | 314951 | LDGKN | 351933 | PSDHS | 373860 | GIHLC |
| 261514 | NSTTL | 314971 | RGLKM | 351937 | KTCLD | 373862 | MTPFV |
| 261517 | PQLPS | 314973 | ITVDD | 351944 | LEKEK | 373863 | RELEP |
| 261520 | KRKIT | 314976 | VQMEN | 351945 | TFLNS | 373892 | FTKQR |
| 261523 | MQIDG | 314978 | VLFEK | 351947 | TSMGL | 373895 | VFQIP |
| 261530 | SPGYS | 314992 | ASGRI | 351956 | TTVTP | 373899 | SYQNT |
| 261531 | KRRKE | 315006 | NTVCA | 351957 | QKPDQ | 373909 | LEPGD |
| 261534 | DSWDF | 315008 | GAQSI | 351966 | LLLSL | 373913 | EHDGT |
| 261535 | SGKTR | 315011 | KDSMN | 351967 | CCVIS | 373933 | AAEAP |
| 261537 | RILLY | 315013 | PRAKL | 351975 | PYLSR | 373934 | SHECC |
| 261556 | NRKNV | 315017 | EKEDA | 351976 | FPAAP | 373937 | TPPNL |
| 261558 | GSLLL | 315021 | FTLVA | 351978 | VFQQQ | 373941 | GPCQC |
| 261560 | ETLQM | 315035 | GTYLY | 351981 | NEKST | 373948 | KSIPT |
| 261574 | LLNSA | 315047 | SSVKF | 351989 | VVCNT | 373952 | EPHLF |
| 261584 | VYHYS | 315051 | SLCLF | 351990 | ATFQL | 373963 | YSQRY |
| 261588 | RRRRC | 315056 | ISVST | 351997 | LILGD | 373964 | LRRFE |
| 261590 | QHSYS | 315060 | AALSL | 352005 | RVLTN | 373980 | GINVV |
| 261593 | FQVNI | 315064 | GIHLW | 352007 | TSSSV | 373986 | IPPTV |
| 261596 | LDDLS | 315070 | KSEWV | 352011 | ADLDP | 373996 | PSMRN |
| 261597 | KSSEE | 315081 | AQAPS | 352015 | AVSSA | 373998 | LFRRT |
| 261598 | SYSGG | 315098 | EPISN | 352021 | RHSGE | 374001 | FSNTF |
| 261600 | NETNS | 315106 | VTPQN | 352026 | MTLLF | 374005 | FQVTS |
| 261609 | YLTGH | 315111 | PEEAE | 352028 | VFPSK | 374011 | PGTGP |
| 261615 | CLSLL | 315112 | PRRRK | 352040 | APQRL | 374013 | SRPPQ |
| 261622 | VPQET | 315118 | WVDPS | 352042 | FTQSR | 374014 | HKKQH |
| 261623 | TDEVV | 315130 | KHREE | 352043 | HERSG | 374016 | KESHS |
| 261636 | LKSRQ | 315136 | QPVYL | 352044 | LQNIH | 374027 | QYLGI |
| 261637 | LAMVE | 315137 | FLGLP | 352047 | LDSRC | 374034 | RPLGF |
| 261643 | GPPPS | 315139 | TMETE | 352053 | MRMPL | 374035 | YDDIN |
| 261647 | NSVKL | 315147 | PMPTT | 352063 | AGRPV | 374036 | HVSSD |
| 261650 | GCWHQ | 315160 | QTCYP | 352064 | CKHKL | 374037 | GGLAK |
| 261651 | SLLQF | 315167 | NSISI | 352065 | AKISK | 374045 | CQLSE |
| 261652 | GGPGA | 315177 | DQPGK | 352071 | ENGNL | 374049 | KVTLS |
| 261654 | DLSAV | 315182 | QTPNN | 352084 | KEDYR | 374050 | LSESC |
| 261655 | VHFTP | 315192 | FHLGL | 352097 | STISN | 374051 | VQESV |
| 261657 | GTAED | 315194 | ERGSA | 352101 | VGSDP | 374069 | KALPQ |
| 261658 | ETQVL | 315202 | NYLNK | 352111 | PRRRR | 374089 | TEPSD |
| 261659 | SPKCD | 315203 | VPRKA | 352117 | KLLEA | 374092 | LHENV |
| 261660 | LIKKK | 315205 | NYQYR | 352119 | KAKGK | 374097 | SSESS |
| 261667 | KEFNF | 315212 | HPIYI | 352121 | EKHSA | 374110 | RDGCY |
| 261673 | EVEAR | 315214 | CRVAC | 352132 | PEFQL | 374113 | NGASA |
| 261674 | QTSAS | 315224 | ATASN | 352137 | VFGKS | 374118 | WTAWV |
| 261681 | STWLR | 315232 | CPASR | 352143 | LSLPH | 374121 | MEAVM |
| 261683 | TILVE | 315236 | RVRQS | 352144 | FWFGA | 374125 | TMCSP |
| 261692 | RNARS | 315247 | YTIEI | 352148 | LEDNK | 374136 | RETVA |
| 261693 | QEAKL | 315263 | LNYKV | 352156 | YTSSK | 374139 | DKGYS |
| 261700 | GKVGR | 315265 | PTDHL | 352157 | LGCCR | 374145 | LPSPD |
| 261708 | QTGHL | 315289 | SFCFK | 352162 | KQHKA | 374147 | IKQEP |
| 261712 | AKKLT | 315295 | THLHG | 352163 | LSLRL | 374152 | EMTDV |
| 261713 | EQSAI | 315299 | VLVSK | 352167 | QPSSL | 374159 | PGPPK |
| 261716 | HMSYT | 315303 | PPPQQ | 352172 | EDRPV | 374171 | VESNV |
| 261721 | IIFYT | 315309 | EPMEH | 352173 | MIGSM | 374175 | ALAST |
| 261722 | QALTQ | 315334 | TIWIQ | 352175 | TVLEK | 374181 | FSSFV |
| 261723 | NRDSS | 315343 | SSCPL | 352176 | LIWIF | 374184 | AQTRK |
| 261726 | LEWEF | 315348 | TLNWP | 352177 | PVTPS | 374185 | SGIPK |
| 261729 | GPLGP | 315351 | LPSQA | 352182 | WRWQC | 374187 | QTKLK |
| 261731 | EAAVW | 315357 | AWCLM | 352185 | GKLLL | 374195 | STHSI |
| 261733 | PQKNS | 315370 | KHSSK | 352193 | SSGGS | 374205 | FYSHS |
| 261735 | EKEEL | 315371 | AKSTL | 352215 | APATT | 374218 | GQPRS |
| 261739 | SLTDK | 315373 | YECGQ | 352216 | ISAAS | 374219 | ILQKA |
| 261740 | DDAPL | 315379 | LESTD | 352219 | ESLRR | 374221 | TSHSA |
| 261741 | QTLQL | 315383 | QELSH | 352221 | PPKSK | 374226 | AGASL |
| 261745 | KKLKI | 315386 | SREEL | 352222 | ELEIS | 374234 | ATGLF |
| 261749 | KIQKI | 315387 | GGGAH | 352232 | QYSFV | 374235 | TPLNG |
| 261751 | AAQRD | 315397 | NIQFN | 352233 | SSDLR | 374237 | LNYIC |
| 261752 | PKLPT | 315398 | LSPSF | 352239 | NSAAQ | 374239 | ALVQM |
| 261755 | ALLPS | 315410 | HPVLW | 352241 | LGHEV | 374240 | AALGL |
| 261758 | KREDL | 315417 | ISWAM | 352248 | DAEDY | 374245 | EALKN |
| 261772 | GDVKN | 315465 | SYTLV | 352249 | HSCVH | 374250 | TIGTR |
| 261776 | RRVVL | 315474 | KFYSS | 352252 | RGERA | 374252 | FTGTW |
| 261778 | IMVLP | 315476 | ILLGD | 352254 | CLSPR | 374259 | GSLRV |
| 261783 | ARVRI | 315482 | AAALW | 352257 | KHFQD | 374260 | STVKT |
| 261789 | NLKMD | 315490 | GPPWP | 352259 | SHCLC | 374265 | LKVAI |
| 261796 | CTCIF | 315497 | QKFRL | 352262 | RKFLN | 374268 | PNQMH |
| 261797 | LQNTR | 315505 | RTHSG | 352265 | VKPVG | 374274 | LRGDV |
| 261798 | NMKGF | 315512 | GAAIF | 352268 | FVKGL | 374280 | RRGLI |
| 261799 | EDSFL | 315554 | SLTGR | 352269 | NKDVA | 374283 | KDYRS |
| 261800 | EEVMF | 315557 | DPNYD | 352271 | GVEFC | 374290 | KLKKA |
| 261804 | AAVAE | 315560 | FSQGQ | 352272 | ETEEL | 374292 | YNIMD |
| 261811 | WDMLT | 315564 | THVQT | 352273 | RPRRV | 374303 | LIRNR |
| 261812 | KRPKY | 315568 | PDEKP | 352275 | TSHCT | 374304 | KAAPQ |
| 261813 | ARRAQ | 315569 | DSSTS | 352282 | WISSN | 374306 | WPGIV |
| 261817 | IPLQR | 315571 | ATQFP | 352284 | NWAPP | 374309 | PGTES |
| 261819 | LINHL | 315602 | AREDA | 352288 | KVTDL | 374315 | SSYPQ |
| 261822 | NSEEM | 315615 | NNLLQ | 352294 | WSLSW | 374323 | KGFHV |
| 261826 | FKSPY | 315627 | GTKAL | 352296 | AGRPV | 374328 | HEQCK |
| 261835 | PPPPC | 315630 | KKTTE | 352303 | CIPLG | 374332 | ACVEK |
| 261837 | LRVWA | 315633 | ARELI | 352308 | SRWDS | 374347 | KNIGL |
| 261839 | FLNRL | 315635 | DEIWL | 352314 | VPYNK | 374359 | LQDLQ |
| 261842 | VMEGS | 315637 | PPFSE | 352315 | ECPAS | 374373 | FPKKK |
| 261844 | FSPRC | 315644 | MEMAV | 352319 | PNEKR | 374374 | LSEVA |
| 261845 | LKHLN | 315651 | SRASC | 352320 | LVVGL | 374375 | TPHPP |
| 261854 | QIVQQ | 315654 | VRAGR | 352336 | SKFYS | 374376 | FEFQV |
| 261858 | RAKHN | 315662 | SRSLV | 352358 | WEYQI | 374377 | GPATL |
| 261862 | FLGSR | 315664 | KKPFQ | 352373 | ITCYI | 374387 | RKKIS |
| 261866 | DMLAG | 315669 | PGDAC | 352377 | GDTSL | 374390 | ESKGS |
| 261867 | QSSSP | 315674 | KKFKK | 352385 | KYEIL | 374408 | PQGMS |
| 261868 | YEDFM | 315680 | LTIPA | 352386 | HILTA | 374409 | PDSWV |
| 261875 | GFLPV | 315682 | KKVTP | 352395 | RWLSD | 374443 | SYAAG |
| 261879 | NQRSR | 315684 | FVWTE | 352401 | RSLDR | 374447 | NALSA |
| 261880 | SDEEH | 315687 | HRISA | 352402 | LHRYH | 374455 | HPPPL |
| 261881 | ITEAR | 315700 | ESLDP | 352412 | SIVSS | 374461 | NQERC |
| 261883 | QPLIN | 315702 | GESEA | 352413 | ICSDV | 374471 | DHGEN |
| 261884 | QNKAV | 315706 | RIKVM | 352414 | PQPLT | 374476 | GRGKH |
| 261887 | SDTDY | 315713 | WMSKS | 352425 | VDWLE | 374481 | LKETI |
| 261888 | NRAKR | 315731 | EVGTD | 352431 | GLTPS | 374483 | IPAHH |
| 261890 | CCQNI | 315743 | LCFPS | 352438 | GMGSS | 374490 | LLLQV |
| 261891 | RSSTS | 315757 | GMKRV | 352440 | YPFQI | 374497 | WKKQN |
| 261892 | CPVSV | 315759 | VAQSF | 352442 | YTSSK | 374501 | NYALN |
| 261893 | KDRSD | 315762 | KVHQD | 352443 | PQPPE | 374507 | EYGCV |
| 261900 | PPLPK | 315768 | MPSDF | 352444 | EKPYE | 374523 | YVVFL |
| 261908 | AITTA | 315774 | DYLYR | 352447 | GLLKE | 374529 | AAWMR |
| 261917 | LPSNL | 315775 | KRLRL | 352455 | RPNGL | 374547 | FCGSS |
| 261918 | GLLVH | 315791 | QKRIR | 352456 | CKRNN | 374552 | PRHRF |
| 261921 | KIVQS | 315794 | TWRIS | 352458 | VLFEK | 374557 | KKKKK |
| 261937 | TDNSY | 315835 | WHLEG | 352461 | WSYSL | 374565 | VPPQW |
| 261942 | DLTDE | 315849 | PGHVD | 352463 | QSERG | 374581 | MERKL |
| 261944 | DTTDL | 315859 | SNSSR | 352469 | KKKVK | 374586 | SSAGK |
| 261947 | EVEWF | 315870 | KGERD | 352470 | STRAS | 374587 | PETEP |
| 261948 | TTLED | 315872 | CSLWR | 352479 | TSITY | 374592 | PLGKP |
| 261951 | LPGRR | 315878 | ELLTS | 352487 | APCQS | 374611 | KTSFL |
| 261965 | RSSHT | 315906 | PYDGV | 352497 | DSRHW | 374614 | NSDVC |
| 261973 | IGLVK | 315914 | SSELT | 352498 | DDWES | 374620 | CAVPR |
| 261978 | CTAKE | 315915 | GAKQP | 352510 | EWEVI | 374630 | FGKKK |
| 261980 | LEDMA | 315931 | NYYRY | 352514 | VWRPY | 374632 | NQSAP |
| 261991 | SDSVA | 315932 | SGLLC | 352516 | EAAKD | 374642 | GRAKA |
| 261994 | NPTLL | 315945 | SEATK | 352522 | AAARS | 374643 | PCYYA |
| 262017 | TYRGT | 315949 | EGLTN | 352527 | SPKGT | 374777 | NRGEC |
| 262018 | ILDQH | 315950 | KILEC | 352536 | LLPTP | 374778 | YSTPP |
| 262027 | GKKKK | 315955 | IMNSS | 352540 | LRKRK | 374779 | DNFPL |
| 262030 | EEHSS | 315988 | VLKVN | 352544 | DMFKK | 374780 | NSYSP |
| 262031 | FQFNK | 316001 | FFVCC | 352545 | RKIPP | 374781 | YNYPP |
| 262032 | EHKVG | 316007 | KISWK | 352555 | DCECY | 374782 | YNLPP |
| 262033 | MPDLE | 316014 | WRCHF | 352565 | LELKQ | 374783 | YSYPP |
| 262041 | EHAHL | 316021 | SAVTS | 352572 | PMIKQ | 374784 | NSYPP |
| 262042 | GDADM | 316029 | LRDEH | 352575 | RTAMQ | 374785 | SNWPP |
| 262043 | TKSKR | 316030 | RTGGN | 352584 | FNAEY | 374786 | NSFPP |
| 262053 | SNKSV | 316032 | AVGSL | 352585 | LESFW | 374787 | NNWPP |
| 262055 | LGTRR | 316042 | GGSSF | 352592 | AHFRD | 374788 | NSYPP |
| 262056 | EDYAE | 316053 | WMDSK | 352599 | VPKSN | 374789 | NSYPP |
| 262059 | PFTFE | 316054 | FVDVM | 352601 | EPLLT | 374790 | GSSPP |
| 262061 | WSLLR | 316092 | GSPEL | 352603 | YVIRI | 374791 | SSSLP |
| 262065 | FMRHL | 316093 | KGTVA | 352604 | MNQEK | 374792 | ATQFP |
| 262067 | PSAFL | 316098 | REGSA | 352606 | CYRQH | 374793 | NSAPP |
| 262069 | EEPAL | 316101 | LPQAR | 352608 | EDQLS | 374794 | LQTPP |
| 262074 | GTTAD | 316109 | KGTLE | 352612 | KTHKA | 374795 | THWPP |
| 262077 | VRRRK | 316114 | EPKKK | 352614 | RERFG | 374796 | DNLPP |
| 262085 | PPERD | 316121 | IRTHK | 352622 | DTNGL | 374797 | YNAPP |
| 262089 | QSVLC | 316122 | VPTWL | 352626 | SSKIF | 374798 | YSTPP |
| 262094 | KKCIC | 316129 | RRGRR | 352627 | KAKGK | 374799 | IEFPS |
| 262095 | TCTKA | 316136 | DDTKM | 352645 | AISGC | 374800 | DNLPP |
| 262096 | MENET | 316137 | EIHPG | 352655 | FDIQF | 374801 | THWPP |
| 262101 | VTCTL | 316149 | GERFC | 352656 | VSLTA | 374802 | IQLPP |
| 262102 | SISPR | 316152 | PLYYI | 352657 | NVQTV | 374803 | AQDPP |
| 262103 | EFNDM | 316173 | RAAFI | 352659 | LELLS | 374804 | ATQFP |
| 262105 | TVRLL | 316176 | AMNNI | 352668 | KLVLG | 374805 | GSSPP |
| 262109 | EKSSD | 316180 | RWGKN | 352671 | SDPGV | 374806 | GNKHP |
| 262113 | SAAGQ | 316193 | KSKRS | 352672 | PHFKH | 374807 | NSYPP |
| 262120 | MNCMF | 316202 | TTPSP | 352673 | LQSRN | 374808 | NSYPP |
| 262126 | ELTPI | 316203 | AGTPK | 352675 | GKAKH | 374809 | NNWPP |
| 262127 | YRSVL | 316222 | ECETI | 352676 | DDEDE | 374810 | FNNYP |
| 262133 | DRGSH | 316224 | KLSAT | 352678 | EPDSD | 374811 | NSFPP |
| 262134 | DKKDD | 316240 | RPFQR | 352682 | PRGPV | 374812 | SNWHP |
| 262138 | RTTPV | 316244 | KFCRQ | 352683 | SAASS | 374813 | FSYPP |
| 262139 | KTKQS | 316255 | RSSST | 352685 | DLTGL | 374814 | YSTPP |
| 262146 | NVSDS | 316262 | AARSP | 352702 | KETHL | 374815 | YSFPP |
| 262150 | VQSNN | 316264 | LSDED | 352704 | ILQQN | 374816 | YNLPP |
| 262158 | IFNSR | 316284 | LRQMC | 352706 | SDLKF | 374817 | WGTGI |
| 262160 | CSSMS | 316302 | QRVVY | 352707 | STLEG | 374818 | GSGIS |
| 262161 | IISLD | 316310 | RVSHA | 352708 | KHLLS | 374819 | WDSNT |
| 262173 | FEKQQ | 316329 | GDSSA | 352709 | ELKDQ | 374820 | YDSSN |
| 262177 | TKGNH | 316338 | TLAGR | 352710 | IMYIA | 374821 | ESSAN |
| 262178 | ETSVI | 316357 | QTKDQ | 352711 | PLQVV | 374822 | SSLSA |
| 262186 | SDPGS | 316377 | AQTRL | 352712 | TTVMY | 374824 | HSNSK |
| 262187 | SCSVM | 316385 | FDIHL | 352716 | EFRSH | 374825 | SLSAG |
| 262188 | VVRNT | 316390 | AGQLI | 352717 | AFLKH | 374826 | NSLNA |
| 262189 | RKWMN | 316397 | KKSGG | 352719 | MELTV | 374827 | GSNFV |
| 262193 | SLRKD | 316400 | LWRRQ | 352722 | VAGSD | 374828 | HSSAS |
| 262198 | FEYEP | 316417 | QFLCA | 352724 | SSNII | 374829 | SLSGP |
| 262207 | VFAVV | 316423 | FFFFF | 352731 | GQPMI | 374830 | YSGAR |
| 262209 | HHLEP | 316426 | NQEKG | 352734 | YLLPL | 374831 | HSSAS |
| 262211 | EDLFL | 316431 | NIVFN | 352738 | TGQRR | 374832 | SLNGP |
| 262213 | KEKSS | 316454 | GSKAT | 352739 | HMPQL | 374833 | YGGAQ |
| 262215 | GINKQ | 316457 | ARGTP | 352752 | APGAH | 374834 | SLSGS |
| 262219 | VALLH | 316465 | CGRPS | 352757 | VGPLI | 374835 | PSNAS |
| 262225 | VRRVV | 316476 | EMVLE | 352770 | AFNLS | 374836 | SLNGP |
| 262227 | LDIST | 316484 | KGQLS | 352780 | PTNTL | 374837 | SSYTF |
| 262236 | CGWAR | 316490 | FSAMS | 352782 | FLIKD | 374838 | HATQL |
| 262238 | AKNNQ | 316494 | ADEGC | 352785 | HYTQQ | 374839 | ADNNL |
| 262241 | YASAS | 316496 | CFSYG | 352790 | TSHCT | 374840 | SGTYP |
| 262244 | SRMCH | 316510 | ALEHF | 352798 | MTASK | 374841 | GSSTF |
| 262259 | GFTKQ | 316512 | NSSSN | 352799 | RRTRC | 374842 | DEDNP |
| 262262 | EVRTQ | 316518 | QLLKD | 352802 | KQAAE | 374843 | DHPTV |
| 262265 | LPVPS | 316527 | PPPRR | 352814 | QLTIF | 374844 | SGNHL |
| 262283 | PLHGR | 316532 | IKEIA | 352819 | GERDL | 374845 | SSSTF |
| 262288 | VTQQE | 316534 | SRGNR | 352820 | ETHQK | 374846 | SGTYP |
| 262290 | ASVKN | 316547 | DLFDA | 352821 | KLSSV | 374847 | SSSTL |
| 262291 | EEKTK | 316565 | QTKTP | 352823 | FKSNV | 374848 | SSDHP |
| 262293 | FDEQN | 316566 | PGEDA | 352833 | PTWNI | 374849 | GSYTF |
| 262294 | ENSGR | 316578 | KKQKL | 352834 | RLNSR | 374850 | SSGNH |
| 262300 | TLDPT | 316589 | DDYLH | 352835 | LGFQG | 374851 | SSTAH |
| 262301 | LPGPL | 316590 | LPILH | 352836 | QNWNV | 374852 | GSNNF |
| 262302 | PACLP | 316596 | VQFFM | 352837 | SSGVT | 374853 | DGQVG |
| 262304 | HPSST | 316598 | KLFPG | 352838 | MEEGR | 374854 | DSSTA |
| 262305 | ILEVK | 316605 | EKAKQ | 352841 | IMWEQ | 374855 | PTECS |
| 262306 | PRWGL | 316609 | LDMND | 352845 | RAHLS | 374856 | PTECS |
| 262313 | QALLP | 316613 | RGWAG | 352846 | IGKFD | 374857 | PTECS |
| 262316 | DAQLH | 316628 | VISCG | 352849 | SKGQE | 374858 | PAECS |
| 262319 | PPASP | 316632 | VLLEA | 352872 | TEGKK | 374859 | PAECS |
| 262320 | VEKVD | 316638 | LQWGI | 352876 | VETNG | 374860 | NGEKS |
| 262340 | LFKKS | 316640 | EDFAA | 352882 | PDLFI | 374861 | NGEKS |
| 262345 | DSLML | 316644 | SRGLS | 352900 | PLQIT | 374863 | CWIRH |
| 262352 | QTSQF | 316647 | ASSNT | 352904 | KKFSS | 374864 | CAAWD |
| 262354 | HYHEN | 316649 | CPDIY | 352916 | RRMQQ | 374865 | ALWEV |
| 262365 | LNLTL | 316651 | FLQGF | 352918 | ARKTV | 374866 | ATWDR |
| 262366 | PAVVN | 316661 | SSTVN | 352920 | QMKEI | 374867 | ATWDR |
| 262370 | ELTPL | 316664 | RLRKR | 352925 | WHPWL | 374868 | ATWDG |
| 262374 | LVMDT | 316670 | NPKAV | 352926 | RLVKE | 374869 | ATWDR |
| 262375 | KMFTS | 316674 | YRKCY | 352928 | MHEDT | 374870 | ATWDG |
| 262376 | VPRKL | 316675 | PLGVR | 352929 | DHLGK | 374871 | ATWDR |
| 262383 | SQHAQ | 316681 | LFRRS | 352932 | TSPFP | 374872 | ASSEA |
| 262384 | AMVLD | 316710 | NKPVF | 352933 | TMSAH | 374873 | CASSQ |
| 262393 | PLVWE | 316729 | CCSII | 352936 | PPSDE | 374874 | CASSQ |
| 262394 | LSYRI | 316737 | SGGCC | 352941 | KNKGN | 374875 | CASSL |
| 262395 | RKILS | 316738 | SIKEK | 352944 | AGKKA | 374876 | ASSEA |
| 262401 | FPQSP | 316740 | MLQII | 352954 | GGSCL | 374877 | ASSSA |
| 262406 | PWESL | 316746 | SGAVW | 352956 | TPQTM | 374878 | CASSQ |
| 262407 | DEEGE | 316754 | LNSLI | 352962 | RRFPD | 374879 | ASSYS |
| 262414 | LNYPM | 316769 | LIFLF | 352969 | FHLLG | 374880 | CASSQ |
| 262415 | AFRRR | 316772 | QPEFV | 352976 | AVLQK | 374881 | ASSYS |
| 262418 | VAMPV | 316775 | ETPRE | 352979 | RPMSC | 374882 | ASSLA |
| 262419 | RPTHR | 316779 | TERVP | 352989 | KIPQK | 374883 | ASSDS |
| 262424 | FAVRQ | 316782 | VIFPH | 352990 | GSPQP | 374884 | ASSLT |
| 262426 | KPCVM | 316786 | PAVAR | 352991 | AFMLV | 374885 | CARSL |
| 262428 | DAQTE | 316794 | IQACQ | 352992 | HLQQP | 374886 | CASSV |
| 262429 | HPEDV | 316809 | MTADD | 352995 | DVIFF | 374887 | ASSES |
| 262430 | KNSKL | 316840 | TDAGV | 352999 | EMEPN | 374888 | ASSLA |
| 262432 | LSSTS | 316842 | EPLEL | 353007 | EGWEG | 374889 | ASSES |
| 262441 | EKRSQ | 316845 | APFRK | 353010 | RHGDD | 374890 | CASSL |
| 262442 | LLLQI | 316854 | YLGLE | 353013 | GSSDA | 374891 | ASSYS |
| 262444 | ESTAL | 316861 | LNSYT | 353023 | LAKEQ | 374892 | ASSLA |
| 262445 | PMYVD | 316881 | PKDEL | 353025 | PQKQD | 374893 | CASSL |
| 262450 | YVTDI | 316898 | YYPGP | 353028 | SCKNR | 374894 | ASSYS |
| 262455 | DRDEL | 316901 | DSELI | 353030 | DHYAT | 374895 | CASSL |
| 262457 | NKTKP | 316905 | FNKGL | 353035 | SQKAK | 374896 | ASSYS |
| 262460 | EHILS | 316909 | FSTIS | 353036 | AILWL | 374897 | ASSLA |
| 262461 | LTFYS | 316924 | QAAAK | 353042 | KSDGP | 374898 | CASSL |
| 262462 | GEIKL | 316933 | QSSHA | 353044 | CSGKM | 374899 | ASSYS |
| 262464 | QIQLY | 316938 | LKFHR | 353046 | LDDDQ | 374900 | ASSLA |
| 262477 | QLPET | 316940 | ILIFF | 353047 | DTESQ | 374901 | CASSL |
| 262482 | PVILV | 316948 | LLKKK | 353048 | LGLNN | 374902 | ASSYS |
| 262483 | FESVP | 316950 | LDRNA | 353052 | RPRQR | 374903 | ASSLA |
| 262487 | EAREY | 316955 | FKKCP | 353054 | RVHGQ | 374904 | CASSL |
| 262493 | GCGLY | 316959 | FRHCS | 353058 | PCWAS | 374905 | ASSLA |
| 262498 | NKAKQ | 316974 | QPTTL | 353059 | LQTLE | 374906 | ASSLG |
| 262499 | AQGCT | 316983 | TQVLM | 353073 | LCQLS | 374907 | AISES |
| 262502 | TFYCQ | 316990 | ALEGR | 353074 | YTSSK | 374908 | CASSL |
| 262506 | LTAAR | 317007 | FLLQH | 353084 | RERPK | 374909 | ASSLA |
| 262507 | LNQRR | 317027 | LTTTS | 353090 | SVGGS | 374910 | ASSLA |
| 262510 | APWGT | 317028 | PRRRR | 353093 | VCFRP | 374911 | ASGLV |
| 262519 | RGSLN | 317033 | RLCPA | 353094 | VHEEF | 374912 | CASSQ |
| 262525 | PGVSL | 317039 | KRLNK | 353098 | NGNEL | 374913 | CATSR |
| 262536 | FVCSL | 317053 | SGPTA | 353099 | TGFLS | 374914 | YSSGG |
| 262539 | MLDPS | 317059 | CCAPW | 353104 | GTASA | 374915 | ASSPP |
| 262544 | VSSAC | 317075 | VWLHY | 353109 | VNQGT | 374916 | CASSI |
| 262545 | ILNKN | 317088 | DKSHS | 353114 | GPNEG | 374917 | ICSAR |
| 262551 | IGSYF | 317110 | FSSCK | 353120 | PALAP | 374918 | ASSKA |
| 262554 | QAVLL | 317117 | GVGGA | 353128 | AGLWS | 374919 | ASSQS |
| 262563 | CKNFC | 317121 | LEGEL | 353129 | QKYGL | 374920 | ATSDL |
| 262570 | LEKGG | 317123 | DSDSD | 353130 | GVVPL | 374921 | CASSE |
| 262577 | IKPRL | 317125 | IGEKS | 353136 | SGPES | 374922 | ASSLS |
| 262580 | SQEPH | 317128 | CYSEA | 353139 | PRRRR | 374923 | CASSL |
| 262584 | QEKEN | 317141 | VFCRE | 353142 | RPLSP | 374924 | LCSVE |
| 262585 | IWKGE | 317143 | KSPHT | 353143 | ETEKN | 374925 | KRKDF |
| 262593 | YRSEH | 317144 | QKMKT | 353151 | VPSSI | 374927 | KDSRG |
| 262605 | LYSCY | 317145 | RCGCI | 353152 | RSPDT | 374928 | CAWSV |
| 262607 | DVATK | 317156 | ALGKN | 353165 | MAIKS | 374929 | FCAVR |
| 262613 | LFSNL | 317159 | YRPPK | 353168 | KKDRR | 374930 | LCAVR |
| 262622 | FADLY | 317161 | CKLSS | 353199 | DSDSD | 374931 | YCAVE |
| 262623 | QELYY | 317170 | NNKNH | 353203 | SGGCC | 374932 | CAVRD |
| 262624 | EIRVK | 317175 | QPGAP | 353210 | AADVQ | 374933 | CLVGD |
| 262625 | LQTHV | 317176 | SRTIG | 353216 | LTSTE | 374934 | FCAES |
| 262626 | MVTQL | 317177 | SESQT | 353224 | IDNEF | 374935 | LCALD |
| 262629 | RPYYK | 317199 | DMFKN | 353238 | DGAAP | 374936 | FCAVD |
| 262630 | SSSTT | 317214 | DLTEL | 353243 | EQARK | 374937 | CAVNA |
| 262631 | VQVAE | 317224 | KTSTI | 353245 | PTLLE | 374938 | FCALS |
| 262633 | KLGLR | 317232 | VHEEL | 353246 | KAKTT | 374939 | ICVVS |
| 262637 | LHRAA | 317235 | GKMRS | 353249 | VSPRV | 374940 | LCVVN |
| 262640 | TSLFL | 317255 | ARDCP | 353259 | VIRKT | 374941 | FCVVS |
| 262643 | GPEMA | 317257 | QAPQA | 353271 | SFLTF | 374942 | CAVGA |
| 262644 | KTGHK | 317271 | AKSLQ | 353275 | NELYS | 374943 | FCAAS |
| 262648 | SPERY | 317272 | FWETS | 353278 | KEKKN | 374944 | YLCAV |
| 262650 | GFGQE | 317287 | LELEM | 353290 | MACLT | 374945 | AVSDT |
| 262651 | YQQQP | 317289 | TLCHS | 353291 | ACAQP | 374946 | FCAEN |
| 262662 | ATNLQ | 317300 | KQKGD | 353292 | PLGGP | 374947 | AMREG |
| 262709 | VVFVK | 317310 | RMMSR | 353295 | DQVCT | 374948 | FCALS |
| 262710 | RGGRR | 317327 | WISGN | 353313 | STPKR | 374949 | AMSAQ |
| 262713 | PANYI | 317331 | SHIQA | 353314 | RNHII | 374950 | FCAVS |
| 262715 | FLNWE | 317332 | TVLSF | 353318 | DSDLE | 374951 | CALSG |
| 262716 | SSAEK | 317333 | ARDCI | 353319 | THWSK | 374952 | FCATD |
| 262717 | PAPLW | 317334 | GALND | 353321 | RGCST | 374953 | YCALR |
| 262719 | YDTPL | 317337 | KDMAT | 353324 | DYYML | 374954 | ALSEA |
| 262723 | SEYWF | 317357 | HLLKM | 353329 | TQKGC | 374955 | LCAVQ |
| 262726 | RAFLQ | 317376 | KARKL | 353333 | AGEKS | 374956 | LCAVR |
| 262735 | YRDMY | 317379 | LDGLL | 353343 | EMKIR | 374957 | FCAVE |
| 262738 | DSEKP | 317382 | TSGLK | 353344 | PDTED | 374958 | FCAAS |
| 262741 | PSLCR | 317396 | HIHLY | 353353 | NLYLL | 374959 | ALGEL |
| 262746 | FSKQK | 317400 | HSNHH | 353355 | QSAKE | 374960 | YLCAF |
| 262752 | TSTGL | 317402 | WPHLR | 353373 | LREGQ | 374961 | YFCAG |
| 262764 | IKNFF | 317404 | YLRLL | 353375 | QETSI | 374962 | CIVRV |
| 262765 | NTSER | 317431 | SSDQI | 353377 | HLQNW | 374963 | AVGDR |
| 262768 | DIEDP | 317439 | NHTEL | 353385 | QESSA | 374964 | YLCAG |
| 262776 | SSGVD | 317442 | QDRGQ | 353393 | AQDLY | 374965 | FCAAS |
| 262794 | HQEPS | 317445 | AGEHA | 353401 | IEWEF | 374966 | FCGTE |
| 262795 | QLDGS | 317447 | RFFSK | 353405 | AVATT | 374967 | CILRD |
| 262801 | FNAPK | 317468 | LVAAS | 353408 | EFESM | 374968 | LCGAD |
| 262809 | LQAWP | 317473 | PELVS | 353409 | QLQES | 374969 | FCAGQ |
| 262811 | PTGRD | 317477 | TGLRM | 353410 | SGEKP | 374970 | LCAVE |
| 262812 | YAPSA | 317482 | SSVKF | 353414 | LETSL | 374971 | CAFMK |
| 262817 | DLTKL | 317498 | ATVSP | 353415 | ISLTV | 374972 | CAYRS |
| 262820 | PLSAP | 317501 | RHDTM | 353427 | DTLPF | 374973 | FCAVD |
| 262825 | PGEVC | 317534 | SDAPD | 353428 | DHEMP | 374974 | YCLLG |
| 262839 | VTTRL | 317556 | PFGRK | 353444 | QCCSN | 374975 | ICAVR |
| 262843 | MKTCH | 317561 | KPNIR | 353452 | EEEEE | 374976 | CACDT |
| 262844 | YNHYS | 317564 | SPLAD | 353457 | SVRGA | 374977 | KLFFL |
| 262848 | IFKNF | 317578 | NSNGL | 353458 | KKSRI | 374978 | YYCAF |
| 262850 | CLLMR | 317579 | EKKVL | 353462 | RGTLG | 374979 | RLWSS |
| 262861 | IDKKS | 317580 | FIPYH | 353465 | TSVSS | 374980 | EGPQY |
| 262865 | DVVYK | 317595 | DKKTK | 353470 | EPLPF | 374982 | LQPHA |
| 262866 | SLDDA | 317614 | SSKGK | 353475 | SKEYV | 374984 | IRQGA |
| 262873 | PKHKE | 317617 | SPGPH | 353483 | LGCCR | 374986 | IRQGA |
| 262878 | KDDPM | 317618 | SAKNV | 353491 | ETLPL | 374988 | SLSPG |
| 262879 | KNCSS | 317619 | ISIKE | 353493 | FFLKW | 374989 | DGTCY |
| 262887 | VVPQA | 317636 | CGPQR | 353500 | KKIYI | 374990 | IGQGA |
| 262888 | SQQSK | 317661 | DDDWC | 353508 | AKQGL | 374992 | IGQGA |
| 262890 | LEPAP | 317668 | QSIKN | 353512 | GSPVD | 374998 | FIKVR |
| 262891 | NDLEL | 317671 | IHKNN | 353515 | PSLAS | 375000 | TLFKV |
| 262894 | FLNDT | 317681 | ERQKP | 353516 | ELGKE | 375002 | YYCAR |
| 262901 | ITNGS | 317684 | FCNKI | 353518 | SLSTN | 375003 | YYCAR |
| 262903 | GYTMA | 317686 | EQEGK | 353527 | RSERG | 375004 | YYCAR |
| 262904 | DFMCS | 317691 | EDQTA | 353537 | LYPQY | 375005 | YYCAR |
| 262915 | LSSGI | 317714 | VTVVG | 353538 | IQQDM | 375006 | YCAHR |
| 262916 | STNMD | 317721 | GKAHL | 353540 | SAVAA | 375007 | YYCAR |
| 262919 | PGTCI | 317743 | LTHFS | 353541 | PANNS | 375008 | YCARG |
| 262932 | DREDL | 317749 | AQLQL | 353542 | PPKSK | 375009 | YCAKD |
| 262940 | LELQT | 317752 | RVGKL | 353548 | MKPKF | 375010 | YYCAR |
| 262942 | GLRIM | 317768 | HMFKC | 353556 | NVVNS | 375011 | YYCAR |
| 262946 | FKKDN | 317780 | GLDKV | 353557 | HVRVA | 375012 | YYCTT |
| 262947 | SRTEL | 317786 | DLKKD | 353558 | RWKIC | 375013 | YYCVR |
| 262948 | TRTAV | 317790 | LRSDP | 353564 | TTSVV | 375014 | YYCAR |
| 262949 | ARDHL | 317804 | YEISV | 353575 | QLMEI | 375015 | YHCAR |
| 262953 | YEVVY | 317813 | MPLSL | 353581 | RGERA | 375016 | YYCAR |
| 262958 | EINLL | 317817 | RSSEL | 353582 | CCSEA | 375017 | ECRGE |
| 262961 | GEGLV | 317818 | PLVNL | 353586 | SKKSH | 375018 | YYCAK |
| 262967 | LKQGS | 317823 | SRGAG | 353589 | EEDPA | 375019 | YYCAT |
| 262968 | PATDL | 317835 | THSFH | 353590 | PPQSE | 375020 | YCARI |
| 262970 | RTAAA | 317836 | HEDKQ | 353591 | FEAGL | 375021 | YYCAR |
| 262971 | LVPAC | 317842 | RHTEL | 353608 | ACTKR | 375022 | YYCAR |
| 262982 | SVTLL | 317872 | KSVTV | 353612 | HKFRD | 375023 | YYCAR |
| 262990 | EEQEN | 317891 | REGPQ | 353614 | VSLTA | 375024 | YYCAR |
| 262992 | GKADT | 317892 | ETLKA | 353619 | KKIIV | 375025 | YCARG |
| 262995 | AKSVK | 317895 | QNHQR | 353622 | VFKAP | 375026 | YYCVR |
| 262996 | SAMSG | 317902 | LCWDY | 353624 | YGFGG | 375027 | YCARY |
| 262999 | MDCAT | 317903 | RASSQ | 353630 | CGCLG | 375028 | YYCAR |
| 263012 | TCIHY | 317904 | GEERN | 353634 | RKDKK | 375029 | YCAKD |
| 263025 | VLEAP | 317905 | NMDES | 353639 | SKSSS | 375030 | YYCAR |
| 263026 | AQMEE | 317912 | RALEH | 353646 | DLPCV | 375031 | YYCAR |
| 263032 | PVCAS | 317926 | ERYNG | 353650 | TYEKV | 375032 | YYCAR |
| 263033 | QKLGL | 317931 | DLSKQ | 353654 | CMKNL | 375033 | YYCAR |
| 263035 | AKTFA | 317943 | QFLAT | 353655 | RLRLG | 375034 | YYCTR |
| 263036 | MDCII | 317952 | RVDPY | 353656 | GGEED | 375035 | YYCAR |
| 263043 | YASRR | 317955 | NDLQG | 353657 | AAAEQ | 375036 | YYCAR |
| 263045 | SNSIY | 317958 | EFRRF | 353670 | FPRKA | 375037 | YYCAA |
| 263056 | TLEYG | 317971 | QCRPS | 353679 | KCRVW | 375038 | YYCAR |
| 263062 | AMEVT | 317980 | ALSKL | 353685 | HILFV | 375039 | YYCAR |
| 263071 | RPPEP | 317985 | PNKPS | 353693 | VHPSV | 375040 | YYCAR |
| 263073 | WAQVG | 317992 | LSEDD | 353695 | VGVPI | 375041 | YYCAR |
| 263080 | RCCLH | 317993 | RAHLS | 353698 | FVFPG | 375042 | ARDTV |
| 263083 | APLAP | 317994 | PCSFL | 353699 | PCKVS | 375043 | YCARI |
| 263084 | DQFAE | 317997 | HYENF | 353700 | RPTTT | 375044 | YYCAR |
| 263087 | LEEEN | 317998 | DHCPP | 353701 | PSGQA | 375045 | YYCTR |
| 263088 | LEVWT | 318024 | FSEKN | 353702 | KKAHI | 375046 | YYCAR |
| 263092 | LVAVN | 318029 | PGRCC | 353706 | DTKAG | 375047 | YYCVR |
| 263093 | GTWRL | 318032 | ILGLY | 353708 | YKCRT | 375048 | YYCAR |
| 263094 | AETVL | 318048 | FARLL | 353714 | FLLFL | 375049 | CSCCA |
| 263095 | QVSSL | 318057 | VTTCA | 353720 | EHIEL | 375053 | ACRVN |
| 263097 | EEAGY | 318066 | DPLIG | 353728 | AFNQP | 375058 | ECPAS |
| 263100 | LVAES | 318070 | AATSN | 353729 | STDIF | 375063 | YWWKN |
| 263115 | IDMAK | 318075 | SGLQA | 353731 | CFSLP | 375066 | GPTSP |
| 263116 | SLGCC | 318077 | FPRRD | 353732 | AEMQS | 375067 | PTGFP |
| 263119 | DYMDI | 318085 | EIQMV | 353735 | DCDMS | 375068 | QESPF |
| 263125 | ERLIS | 318089 | ASTDL | 353739 | YFRDK | 375069 | GCWHK |
| 263126 | FSDEY | 318094 | KQGKF | 353741 | DLDDY | 375072 | EAKAI |
| 263150 | LLQEK | 318113 | TNLKH | 353742 | SCSGL | 375073 | FINRE |
| 263154 | PKSPQ | 318115 | RSKQP | 353748 | QITWQ | 375076 | QSLCC |
| 263160 | RVDYS | 318119 | PTQAS | 353759 | CDFTF | 375080 | DLEPL |
| 263168 | EMQNA | 318128 | ERPQL | 353767 | QALTL | 375081 | ETRAQ |
| 263170 | SLFLI | 318131 | ESRKV | 353769 | PLPPL | 375083 | AWTTW |
| 263174 | GKKVI | 318136 | FIFQK | 353770 | LDADF | 375085 | QEVKV |
| 263181 | KGNLR | 318142 | GWFQA | 353778 | KTNEA | 375086 | ANSGL |
| 263182 | VENGN | 318154 | RSESS | 353780 | RDLQE | 375087 | NLGRF |
| 263187 | EKTEE | 318158 | VYKYL | 353783 | RGERA | 375089 | TADCR |
| 263196 | LNTVV | 318165 | DEFDF | 353784 | GEMVG | 375090 | GATPH |
| 263200 | FDGHE | 318171 | LSSFF | 353785 | VQGGK | 375091 | WQMTR |
| 263201 | ISLLS | 318174 | PRHEV | 353786 | EYKKP | 375092 | NQSTP |
| 263205 | CLSAA | 318176 | IAERK | 353787 | HLKIK | 375093 | CQIRC |
| 263207 | VDSWV | 318177 | HSQEQ | 353792 | WSLVG | 375094 | FRESS |
| 263208 | ILRDK | 318182 | WLEEN | 353793 | AFKQE | 375095 | VWAKR |
| 263209 | CTVDV | 318184 | PTDWK | 353794 | DAFPQ | 375099 | LLGSL |
| 263212 | APPRS | 318185 | LLNSY | 353796 | PQTNP | 375105 | RPPRP |
| 263228 | GNEES | 318195 | KTKFE | 353797 | HREDR | 375107 | FSGFY |
| 263233 | FSNQM | 318196 | TDMED | 353806 | KLDAN | 375108 | FSGFY |
| 263238 | FGVMS | 318197 | EGEAY | 353824 | SSESL | 375109 | RSGFY |
| 263239 | RQFSH | 318203 | EKYGI | 353826 | LAVER | 375110 | KSRLQ |
| 263243 | ATTGE | 318208 | WRNRS | 353844 | LKTQD | 375112 | DGQSP |
| 263245 | DRYGS | 318212 | GSWGH | 353846 | PNSPF | 375116 | LLTSQ |
| 263246 | VEAIQ | 318217 | ALNTV | 353847 | FLTWL | 375126 | GVGRG |
| 263253 | TLDIH | 318222 | VQCRK | 353854 | QSHHL | 375127 | PLIPM |
| 263255 | RAHQH | 318226 | YKRIS | 353858 | SVNSL | 375128 | LLEEL |
| 263256 | PNGQS | 318227 | QCMPS | 353863 | GQTFG | 375129 | LLEEL |
| 263257 | PQKVG | 318262 | RLTPA | 353864 | KNSSR | 375130 | CCPGL |
| 263258 | GPLAK | 318264 | DKHIF | 353866 | ELEYL | 375132 | RRPCG |
| 263265 | LQSSF | 318275 | HHQPQ | 353868 | GTWPG | 375133 | SPQSK |
| 263266 | LGGQP | 318279 | SAPQR | 353871 | LESTL | 375134 | AVMQS |
| 263269 | LESEV | 318297 | DKYMK | 353873 | KLTRL | 375135 | GSGRA |
| 263270 | LQSLE | 318304 | THIYI | 353877 | AQEAV | 375136 | AKPKP |
| 263273 | VPQHL | 318310 | SLGLG | 353883 | AGESS | 375137 | TLRTK |
| 263274 | PEDTY | 318318 | ACCLL | 353888 | ARLGR | 375138 | FRDEK |
| 263277 | KGSAE | 318340 | MKAIA | 353893 | VLISD | 375139 | SYSVE |
| 263278 | PDIPS | 318351 | KMINY | 353902 | MVQVI | 375140 | FLPQC |
| 263281 | LESYC | 318352 | KSESS | 353904 | IQRHK | 375141 | AHEQG |
| 263282 | RTLTR | 318355 | LECKL | 353910 | PEAEK | 375142 | YFLNS |
| 263284 | LDMRS | 318373 | HTDSS | 353915 | QPSDT | 375143 | FMTNQ |
| 263285 | YENFT | 318374 | QLSAF | 353920 | FSLTP | 375144 | LCVLS |
| 263301 | FHSTC | 318395 | LGVAM | 353924 | YKNVE | 375145 | NPNIL |
| 263309 | ADVDH | 318409 | TAIVL | 353928 | EFMAS | 375146 | LPIRN |
| 263311 | HRLVF | 318415 | GRSRY | 353931 | DVFQR | 375147 | KPANC |
| 263314 | FSIGH | 318417 | RGSAL | 353940 | SGQQV | 375148 | KATLC |
| 263317 | KESFS | 318421 | LFQLV | 353942 | QKIFA | 375149 | QPACC |
| 263321 | YQSHL | 318423 | TMNTL | 353945 | PKAYS | 375150 | QHSCC |
| 263326 | SEVSD | 318429 | KDSRG | 353947 | GSPPP | 375151 | GSSCC |
| 263331 | KLDVV | 318437 | LPSEK | 353950 | PGENL | 375153 | RHCGI |
| 263334 | AFDHL | 318445 | IFKGR | 353953 | TKKDS | 375154 | RQRVQ |
| 263339 | LENQA | 318451 | GIRLT | 353959 | AKRMK | 375157 | PQSSS |
| 263341 | QFVSS | 318472 | NESKA | 353967 | TEFKK | 375160 | LMARE |
| 263346 | EGEWD | 318479 | DNDYN | 353968 | NTYHT | 375162 | SVLRK |
| 263354 | EEDLR | 318484 | GMLRS | 353969 | TENSE | 375166 | RSEGS |
| 263367 | GTSTQ | 318486 | LGLDR | 353971 | PYNGT | 375170 | QVFKK |
| 263368 | SHQYQ | 318500 | HHAFR | 353987 | LPLPA | 375172 | DSPGG |
| 263369 | DFYCQ | 318502 | RSSPE | 353988 | ILHTF | 375174 | LAQYL |
| 263370 | GLAQS | 318516 | RECEV | 353998 | QPKQD | 375178 | IWERT |
| 263372 | ASIPR | 318520 | TSLKL | 354003 | ETSDQ | 375180 | WPGWS |
| 263373 | SGRRK | 318534 | MAPPS | 354019 | RSLFN | 375181 | TMDQI |
| 263377 | EENLF | 318546 | VESPL | 354024 | KEQKT | 375184 | AWPTW |
| 263378 | GGGAP | 318557 | ITIYS | 354028 | SPGSQ | 375188 | HLSSP |
| 263379 | PQVLA | 318565 | LPRGC | 354031 | ASFSF | 375189 | IFLVG |
| 263382 | SMDCI | 318602 | EKYRV | 354033 | VPPLT | 375190 | QGRFQ |
| 263383 | GSIAV | 318604 | PVICI | 354039 | PYWTN | 375191 | VYICK |
| 263384 | VSWTK | 318607 | GTEEV | 354044 | NDIPY | 375192 | SVKKP |
| 263388 | RQVLA | 318615 | SMASR | 354053 | LNHHS | 375193 | LEALE |
| 263390 | YVCLD | 318629 | FHAPL | 354061 | KDLFG | 375194 | LPKLV |
| 263401 | AVASK | 318631 | PAQAV | 354069 | HGSCL | 375195 | YRGGP |
| 263405 | IYDND | 318635 | TGGVY | 354070 | EAIPQ | 375196 | QRTRG |
| 263408 | FPNEK | 318641 | GSDSD | 354075 | RIWSR | 375197 | DGGDI |
| 263409 | NKPND | 318646 | LGFFF | 354080 | LRPYK | 375199 | LLTSQ |
| 263413 | GKCLA | 318650 | DSDKQ | 354086 | LHGAA | 375200 | TEKRR |
| 263431 | PVPVM | 318674 | CLVIE | 354087 | SLMAV | 375201 | LLTSQ |
| 263433 | SKLSK | 318684 | LPMVV | 354089 | SIITY | 375202 | AGLSR |
| 263437 | HDFMI | 318687 | NMDLD | 354090 | AERPG | 375203 | RKHPS |
| 263440 | QKKIS | 318690 | LIKED | 354098 | PRLAG | 375204 | GESGH |
| 263447 | ITNID | 318697 | EEIDG | 354099 | TCASS | 375205 | PNTFF |
| 263461 | EPIEE | 318713 | AILQK | 354107 | VETMM | 375206 | NCCIK |
| 263464 | RTFLS | 318727 | KIDDA | 354108 | YSRTM | 375207 | GVQWH |
| 263468 | CRDKR | 318753 | TSGDY | 354109 | HSSQK | 375208 | GLGNL |
| 263498 | PVFGA | 318770 | INKKE | 354111 | TDGFN | 375209 | ESKQK |
| 263511 | GCRSS | 318775 | PELDS | 354130 | TLSRP | 375210 | SCGLV |
| 263512 | LFPVP | 318784 | CCSEN | 354140 | LDHLP | 375211 | NKLKK |
| 263519 | VETSL | 318799 | CTEKP | 354148 | LICTP | 375212 | RGHQL |
| 263525 | QSLQF | 318804 | KVLVF | 354151 | LRWVQ | 375213 | PARKP |
| 263528 | KNSSC | 318811 | KSSNT | 354155 | QMKGP | 375214 | DKIKA |
| 263549 | FSSRQ | 318821 | PSGKR | 354158 | LEESS | 375216 | LLESP |
| 263551 | QYPYI | 318834 | CPPSS | 354159 | KLVTA | 375217 | GNFNR |
| 263556 | LSELE | 318846 | MFRIV | 354168 | AGDSG | 375218 | QEPFC |
| 263559 | EQPEM | 318861 | KEFKF | 354170 | WSPTM | 375219 | MLLEK |
| 263563 | PEDLL | 318867 | LHPTE | 354171 | CSICC | 375220 | GVNLR |
| 263569 | NFEVI | 318868 | GLPDF | 354175 | SRNQE | 375221 | TAKAL |
| 263574 | EQMQI | 318870 | GREET | 354190 | NLLLL | 375222 | APPEG |
| 263576 | EKIDY | 318877 | EKASF | 354193 | TYRPV | 375223 | VCVYI |
| 263578 | ENNII | 318878 | YKKIS | 354198 | LSLLF | 375225 | SQAVC |
| 263579 | EAQQS | 318881 | REFSR | 354203 | KREKK | 375229 | SNTDS |
| 263593 | SNVAK | 318883 | ALRKK | 354204 | EDDPD | 375230 | GLWLS |
| 263598 | SPGSD | 318884 | ISMKT | 354206 | GGQER | 375232 | ASSCC |
| 263610 | AAQPR | 318898 | EKPCE | 354207 | LDILG | 375234 | ASSCC |
| 263620 | NNSLP | 318899 | LGFLR | 354213 | DFGWD | 375235 | KSMLQ |
| 263621 | ASRTH | 318900 | RNQNK | 354217 | RQTAG | 375236 | ASSCC |
| 263629 | WDPGF | 318902 | NEDME | 354218 | QRSKV | 375237 | RTSSC |
| 263635 | IESNV | 318912 | RASFH | 354227 | PSPGP | 375238 | RTSSC |
| 263636 | PSFHD | 318914 | LEGHF | 354228 | ASRRL | 375239 | CEPTC |
| 263639 | TVVFK | 318916 | VECSV | 354232 | AENEF | 375240 | HPEQV |
| 263640 | LKTDC | 318921 | TATKA | 354251 | VTSSA | 375241 | LAEFY |
| 263642 | FSDED | 318927 | SWWPL | 354255 | WLLKY | 375242 | HGIHV |
| 263650 | NHILK | 318944 | KVWTC | 354263 | ASFSF | 375243 | CSDNV |
| 263655 | KESFL | 318956 | PRKDM | 354265 | PDSDP | 375244 | YISPG |
| 263657 | SADRF | 318965 | VTEMP | 354266 | SSGLC | 375245 | TMGQA |
| 263663 | KVRRH | 318966 | KKDSK | 354270 | EEREL | 375246 | AAFGL |
| 263666 | SVTTV | 318974 | SHKSR | 354280 | IAANS | 375247 | NHKSM |
| 263671 | DITKT | 318977 | RFQST | 354291 | TVRRG | 375248 | GHPRS |
| 263672 | ERKIK | 318982 | ATLFF | 354293 | PNFSP | 375249 | SQPRK |
| 263674 | LLWRV | 318986 | STGKW | 354294 | ILAAN | 375250 | AYLKH |
| 263681 | FFQRK | 318988 | VRIDV | 354299 | LELKA | 375251 | KQTFI |
| 263686 | FDPSP | 318997 | IRQNS | 354305 | FRRDL | 375252 | WSRSR |
| 263694 | MGEIQ | 318999 | NKNSR | 354313 | SGGDS | 375254 | NVPNS |
| 263697 | MEQRE | 319006 | PYSAV | 354320 | TLLTS | 375256 | GGVHL |
| 263702 | QILTM | 319009 | SEEEM | 354335 | GQSPA | 375259 | GTRPS |
| 263707 | LKCGL | 319020 | VLHFS | 354337 | APAVP | 375260 | EAKSD |
| 263708 | TSTNK | 319027 | SYSQS | 354340 | LHFTS | 375261 | TAPTS |
| 263710 | VSTHS | 319037 | HQGLI | 354361 | IYKWE | 375264 | QALLG |
| 263713 | LTTEL | 319051 | LRTVL | 354368 | FADDP | 375267 | EDEDF |
| 263717 | TNIEN | 319052 | KTSLY | 354370 | PNGML | 375268 | EDEDF |
| 263723 | LSTTI | 319053 | THAGA | 354376 | CCISL | 375269 | FVLVI |
| 263726 | DHPPF | 319062 | GFLFL | 354386 | WAGEP | 375276 | KRDHP |
| 263733 | PLSHL | 319071 | TVSQN | 354394 | MMNTV | 375277 | KRDHP |
| 263734 | LDQAT | 319083 | LAFVC | 354403 | YTSAK | 375278 | KRDHP |
| 263735 | RELNA | 319090 | RENKL | 354410 | KDNRQ | 375279 | KRDHP |
| 263736 | LIRVL | 319091 | LVHIR | 354412 | CFFLR | 375280 | KRDHP |
| 263753 | HICLR | 319093 | IGFYI | 354414 | VPVLS | 375281 | KRDHP |
| 263754 | GLIDK | 319096 | ACVIL | 354416 | HKTPY | 375282 | LLVFY |
| 263762 | PSKDA | 319104 | DEMDR | 354421 | LPVKP | 375283 | SPRGM |
| 263765 | GLCGG | 319118 | EISPL | 354427 | RPRHT | 375284 | CPHEE |
| 263773 | MAPNT | 319125 | TYFYF | 354441 | SDDEF | 375285 | YCNPK |
| 263774 | KPDAK | 319126 | KDSRH | 354446 | TGEKP | 375286 | QTRRS |
| 263776 | SDQRR | 319139 | LGEDS | 354448 | AISCW | 375288 | LSMAG |
| 263780 | ALGVD | 319141 | QRSTM | 354451 | KFLRK | 375289 | AGDAK |
| 263791 | YRILF | 319152 | FRAIV | 354453 | QRTHT | 375290 | IPDVR |
| 263795 | NEKSC | 319165 | QMRSR | 354458 | QTQAC | 375291 | RRHPL |
| 263798 | PHSSC | 319166 | ESLYS | 354463 | RQAQD | 375292 | QHKDE |
| 263800 | PTYRS | 319169 | YTIGL | 354476 | AIAAS | 375293 | LLTSQ |
| 263802 | SKLSR | 319170 | CEKDD | 354478 | QPQLM | 375294 | LLTSQ |
| 263805 | SKIDS | 319179 | LQVYC | 354481 | GKLCS | 375295 | APCGQ |
| 263810 | SFAQH | 319192 | GEFIY | 354486 | RSGIF | 375296 | APLSN |
| 263812 | VAATQ | 319197 | SREDT | 354490 | KETYY | 375297 | FFLFY |
| 263816 | EDSEV | 319202 | IMLTP | 354497 | SQSLS | 375298 | LQEQV |
| 263817 | GSPIS | 319210 | SSCLG | 354498 | TQFMN | 375299 | IFIKL |
| 263826 | ASGRE | 319217 | SAQNF | 354499 | VYMKS | 375300 | DRRAP |
| 263845 | KLFPL | 319228 | QPEDV | 354501 | NQLLL | 375301 | LLTSQ |
| 263846 | HQLKA | 319231 | KPRTP | 354507 | GLPQH | 375302 | AVPPL |
| 263847 | CPDIF | 319233 | YEVIY | 354518 | KGALL | 375303 | PPTEP |
| 263849 | RRMIL | 319235 | HQTTR | 354519 | RIIQI | 375304 | SNQRM |
| 263851 | GTKEH | 319240 | KIKPI | 354522 | EDYEF | 375305 | HTTKK |
| 263856 | ATLRS | 319250 | ESSLS | 354525 | KVYWY | 375306 | VAELI |
| 263857 | KQPLR | 319251 | LKDLI | 354526 | SHNEL | 375308 | HCLPS |
| 263864 | TGAFS | 319254 | REACG | 354540 | IVHYG | 375309 | FGGQA |
| 263867 | FKDWK | 319255 | DATTD | 354541 | STTRV | 375310 | HVIWI |
| 263881 | HENSY | 319279 | RISEK | 354543 | NVSSA | 375311 | GWRLQ |
| 263895 | SCTVM | 319281 | VTVKE | 354545 | CVGAG | 375312 | CSLPL |
| 263897 | MPKLK | 319286 | ERALG | 354548 | PRPVL | 375314 | CHHTS |
| 263904 | QQPLL | 319288 | HRPAA | 354553 | YQSIN | 375315 | CSPPG |
| 263915 | ARIAL | 319305 | SNSSS | 354554 | NKMLK | 375316 | IIEVM |
| 263918 | AKVFV | 319318 | DIEDF | 354558 | WCPFW | 375320 | AEEDV |
| 263921 | IFRPD | 319321 | RWGLF | 354560 | YGYGS | 375321 | AKFLA |
| 263923 | SSPPV | 319322 | KRLCI | 354566 | NQRRI | 375322 | PTPFR |
| 263925 | PGTFL | 319323 | LRALK | 354568 | ENNFD | 375328 | LHRYR |
| 263932 | AASGK | 319326 | RPWRF | 354569 | SITSI | 375329 | STMYI |
| 263946 | FTSRF | 319336 | QVLRN | 354571 | ILGLE | 375331 | RFSEC |
| 263947 | HKMLS | 319341 | PKNCK | 354574 | TSVQV | 375333 | KESHS |
| 263955 | SDLLC | 319342 | SRHRR | 354575 | ESLVV | 375334 | KESHS |
| 263956 | TYCSI | 319343 | TSTDF | 354581 | QFNTH | 375335 | RTLSM |
| 263960 | EVHHT | 319370 | RAEKS | 354582 | SQPIT | 375336 | KERLT |
| 263963 | FNLDP | 319371 | RFYHK | 354583 | YESHV | 375337 | YGLCL |
| 263964 | LHLRK | 319388 | VTSDP | 354586 | LNMMT | 375338 | KQRSM |
| 263966 | RRIPS | 319393 | AKPKP | 354590 | SSLLS | 375339 | KKRTS |
| 263967 | QHALN | 319398 | KRRRT | 354597 | APPEC | 375340 | KQRSK |
| 263969 | SNEES | 319412 | IIPKI | 354600 | EIFFS | 375341 | ASRSD |
| 263974 | KTTKK | 319417 | SNKEN | 354603 | KQSQC | 375342 | MRHPK |
| 263980 | FPKGQ | 319422 | VIFPQ | 354607 | SLSHV | 375343 | GFWVA |
| 263985 | KKLSL | 319436 | TCDRC | 354608 | EPWLS | 375345 | KGQTL |
| 263991 | KCVLQ | 319464 | RAAGP | 354612 | PSTEL | 375347 | LCKAQ |
| 263997 | DLDSD | 319474 | TYRTF | 354614 | PNPQL | 375348 | QLFRN |
| 264005 | PPPPE | 319476 | TDVTL | 354616 | SQASQ | 375349 | YVKPK |
| 264009 | ASPSP | 319479 | ERLLM | 354620 | WDSIV | 375350 | QATSG |
| 264010 | SMMDR | 319482 | PEEQT | 354622 | IKDAF | 375351 | KQSDQ |
| 264012 | GGEDD | 319486 | LELLA | 354623 | FNVML | 375352 | HSPVK |
| 264018 | EDEKP | 319501 | KKPKV | 354632 | LHDNT | 375353 | ADFAC |
| 264020 | TLTFS | 319506 | NINIT | 354633 | KIIFF | 375354 | LWGVR |
| 264025 | KEWYV | 319511 | RTSFH | 354643 | EKLHS | 375355 | DGRGA |
| 264027 | FTKTE | 319531 | KSIEE | 354645 | PSLPD | 375356 | LSTFE |
| 264029 | SLLPW | 319546 | VERAL | 354647 | GGFTS | 375357 | PPKPM |
| 264031 | LGSRK | 319547 | LFLGV | 354649 | SFLMS | 375358 | LEMRL |
| 264033 | AHVAT | 319558 | GVVAR | 354652 | DNEKI | 375359 | KVTVK |
| 264036 | IDLRH | 319570 | KPCCY | 354660 | VSFSE | 375360 | WNAVA |
| 264037 | SGTTS | 319574 | TASQR | 354663 | SEAEK | 375361 | SPPST |
| 264039 | RPRWR | 319590 | HLSTL | 354665 | IARGN | 375362 | KELLY |
| 264042 | RGKEE | 319591 | KVSAL | 354669 | DCILL | 375364 | GGTEQ |
| 264047 | EDNLQ | 319597 | EESDS | 354671 | LLKQT | 375365 | GGTEQ |
| 264051 | SRNRQ | 319601 | NKHIA | 354675 | IIETM | 375366 | GWDEP |
| 264057 | PAVEA | 319622 | FCMEL | 354676 | GYLMG | 375368 | QCMKI |
| 264059 | ANFNT | 319623 | VSSSA | 354677 | KREDL | 375370 | RTGRA |
| 264065 | NKDEL | 319625 | TRCTL | 354680 | ERLSA | 375371 | LPGLR |
| 264071 | EEEVA | 319632 | RGERA | 354684 | FDFEL | 375373 | SALPF |
| 264072 | APLHS | 319635 | TSTTL | 354686 | SAQHH | 375374 | SLPKC |
| 264073 | NKSHK | 319636 | PIPQR | 354687 | IPPQT | 375376 | GLNRG |
| 264079 | SLLVN | 319651 | NQDNP | 354688 | QMLKI | 375378 | SLAVK |
| 264080 | GRELL | 319654 | LCEEK | 354698 | ERPKK | 375381 | FLCHG |
| 264088 | PQPPE | 319664 | KAKFN | 354700 | AKTLK | 375382 | LLKMI |
| 264089 | GSKDR | 319673 | KQMAP | 354703 | LGPDG | 375385 | CERPV |
| 264093 | FVKNL | 319678 | LHKKN | 354707 | LLGKG | 375386 | CERPV |
| 264094 | SNQII | 319690 | GEDDS | 354708 | ETPAP | 375387 | SEVIS |
| 264106 | NESYS | 319699 | AIEKM | 354709 | NETTV | 375388 | DNPPA |
| 264108 | RLAQE | 319705 | ITTNL | 354711 | LTANH | 375389 | ASTWV |
| 264110 | QPSGS | 319706 | EKQRG | 354717 | WIHFI | 375390 | AWLQS |
| 264122 | PRLNL | 319713 | DARGY | 354718 | EEIFC | 375391 | IEEVD |
| 264128 | GVTQK | 319716 | LSPGV | 354719 | KERGK | 375392 | PGKGL |
| 264144 | ALEQQ | 319726 | SLEQG | 354720 | DTTHG | 375393 | VPMEI |
| 264151 | LKMEI | 319730 | WLSEH | 354721 | TDAHL | 375394 | DNPPA |
| 264156 | YLLED | 319744 | LPPAQ | 354722 | DIDDI | 375395 | ACRVN |
| 264157 | QGMNM | 319756 | LGQRK | 354726 | FGVYI | 375396 | SFVDF |
| 264158 | DTSFF | 319771 | KSALL | 354728 | NLLQC | 375397 | ACSIM |
| 264159 | FLVKK | 319778 | YLRGK | 354729 | SNGSN | 375398 | VCIRG |
| 264160 | RASSQ | 319779 | APHFR | 354730 | EEQQI | 375399 | IEEVD |
| 264161 | KRLTP | 319788 | IKARK | 354733 | AQAPL | 375400 | PGKGL |
| 264162 | PVSSF | 319796 | KYPPV | 354734 | ELKIL | 375401 | AQIQP |
| 264167 | NRNLL | 319799 | QRAEA | 354739 | ECPAS | 375402 | NKMLK |
| 264169 | SLSWL | 319806 | KVLTW | 354742 | QTIGI | 375403 | IARGN |
| 264170 | AETKN | 319814 | RISQM | 354749 | PHREA | 375404 | LLLIT |
| 264181 | LQHSR | 319817 | PASEK | 354753 | PGNLV | 375405 | NLLQC |
| 264183 | SVECR | 319826 | LVRVE | 354755 | AQEIG | 375406 | LDWAE |
| 264187 | CIEQK | 319829 | AVGDN | 354762 | RASGS | 375407 | YVSIY |
| 264192 | EESRF | 319831 | PAPEN | 354765 | QRKQK | 375408 | PVFTL |
| 264193 | RDWVR | 319851 | LATQR | 354769 | DDCCC | 375409 | VYMKS |
| 264198 | PLYNS | 319853 | LGRKT | 354770 | SELDN | 375410 | MLMIL |
| 264211 | ESEDN | 319897 | YSPLP | 354772 | QIPQS | 375411 | LYEVM |
| 264218 | SAGFI | 319906 | LSAAT | 354774 | EQQIF | 375412 | GTHYR |
| 264220 | VELEW | 319910 | SLSDT | 354775 | IAEAP | 375413 | VPGCA |
| 264221 | RECNL | 319914 | SIKVH | 354777 | ENSKI | 375414 | RAPAS |
| 264228 | LPFLF | 319918 | HFDAM | 354778 | KEWLI | 375415 | FLVVL |
| 264229 | PQIIK | 319936 | PSIIS | 354780 | RRKML | 375416 | VNFQC |
| 264230 | GKINV | 319974 | SCADQ | 354787 | PHHRS | 375417 | RQRSF |
| 264231 | HTPEL | 319975 | QDKIN | 354789 | WMSRQ | 375418 | LVTVG |
| 264234 | SRIEY | 319977 | MEVSC | 354796 | HWTYK | 375419 | LVTVG |
| 264244 | KQDKD | 319979 | FLHFS | 354800 | KLIYH | 375420 | SFCYR |
| 264245 | GRQIE | 319984 | IGATR | 354806 | SLTEQ | 375421 | LYEVM |
| 264246 | SVRPV | 319986 | PPPPL | 354811 | DSRCN | 375422 | LVTVG |
| 264249 | DFLLN | 319991 | QMEPV | 354813 | LLLIT | 375423 | RQRSF |
| 264254 | DSEGD | 319992 | ELYAV | 354815 | ESQKK | 375424 | PLIPM |
| 264255 | DSDDD | 320006 | LMVLS | 354821 | VKSCL | 375425 | LVTVG |
| 264257 | TLTTG | 320017 | ISVGR | 354826 | SPTKV | 375426 | RQRSF |
| 264258 | NVDEN | 320025 | VYIRQ | 354830 | VIEGS | 375428 | LPRGC |
| 264260 | QPKEW | 320043 | LPPID | 354834 | KPWET | 375429 | LPRGC |
| 264263 | GKAKN | 320050 | HVRLH | 354841 | LQGLQ | 375430 | CEPRC |
| 264265 | EVQLE | 320053 | KQDEL | 354842 | ALYLT | 375431 | RTSSC |
| 264266 | FSHTE | 320077 | PSERE | 354846 | IRQRI | 375432 | RTSSC |
| 264276 | REKLN | 320081 | SNNVR | 354848 | KMALT | 375433 | RTSSC |
| 264279 | RENED | 320083 | LKEVL | 354849 | HNKDF | 375434 | RTSSC |
| 264312 | DTWDE | 320084 | GQEIA | 354850 | LGRSL | 375435 | ASSCC |
| 264313 | KDGCY | 320087 | RPKSE | 354852 | EDQLG | 375436 | ASSCC |
| 264316 | IAETW | 320089 | GVRAW | 354855 | KDRRK | 375437 | ASSCC |
| 264318 | SESLM | 320092 | VPLPQ | 354866 | FKHNF | 375438 | FSLWL |
| 264319 | VSTGF | 320096 | VEADQ | 354869 | ISALK | 375439 | RAPAS |
| 264326 | VDLPN | 320117 | RVTLN | 354871 | VTNLG | 375440 | NLKEC |
| 264331 | FAMFN | 320122 | AESHL | 354874 | GSFRR | 375441 | TGGKV |
| 264335 | EDENQ | 320130 | VELSA | 354876 | PVFTL | 375442 | CPTRI |
| 264344 | DSKSM | 320133 | GPFGS | 354877 | STATV | 375443 | GSGRR |
| 264345 | GFSLA | 320147 | EMEIP | 354880 | GNMFL | 375447 | PGYTM |
| 264346 | MLTQS | 320168 | FEPHI | 354883 | AGGAP | 375453 | PQSSS |
| 264350 | NRGFG | 320171 | VVPVP | 354884 | VLLST | 375459 | MTFSC |
| 264357 | ESVKI | 320176 | VKLLE | 354888 | KRRRF | 375463 | NVTFL |
| 264360 | RKRIC | 320180 | LTSMC | 354890 | FTSAL | 375464 | HASAS |
| 264363 | LQKVR | 320184 | GLLPP | 354891 | ISTDV | 375465 | LILLG |
| 264376 | VIDFS | 320188 | GGLAS | 354892 | AHTNK | 375466 | PTLGG |
| 264377 | QQGPI | 320207 | SYSVS | 354895 | ADDDP | 375467 | NSSLA |
| 264380 | LGLNC | 320210 | IPKDV | 354900 | RCSAC | 375468 | FMVIS |
| 264381 | SCVGL | 320218 | NRNFI | 354901 | QKKTT | 375469 | DLAHR |
| 264382 | EINWS | 320219 | GVTCG | 354903 | RGMGG | 375470 | VGFLY |
| 264387 | WFQGN | 320221 | CCVQE | 354911 | DENES | 375471 | QIGEG |
| 264389 | AQMAQ | 320232 | TVFHS | 354912 | VHNFR | 375472 | AWPTW |
| 264399 | WDKDF | 320234 | PWVIT | 354913 | LKYFQ | 375473 | TKSYT |
| 264409 | NGSLS | 320236 | DYYLR | 354916 | AKEAF | 375474 | LSPAG |
| 264412 | TLVLK | 320239 | VRLML | 354917 | ILNEL | 375475 | TPSCC |
| 264414 | YTYVA | 320246 | QSQLN | 354919 | VTTYL | 375476 | TPTGC |
| 264424 | HQNQD | 320247 | EMESV | 354920 | TVKIV | 375477 | QKSSC |
| 264426 | ESVKI | 320248 | VPSLL | 354923 | REDTM | 375478 | QKSSC |
| 264428 | WSIYL | 320251 | ALMGV | 354927 | AQLMY | 375479 | QKSSC |
| 264431 | QVSAV | 320252 | DLALK | 354929 | EHDEN | 375480 | GRHVH |
| 264432 | RIEEC | 320264 | LESAS | 354932 | EQAKK | 375481 | IPKMS |
| 264433 | AQILL | 320279 | SVCSL | 354945 | LNSLK | 375482 | FGYYY |
| 264434 | TITFP | 320291 | LPDIY | 354947 | EMQNA | 375483 | AHYLL |
| 264436 | EKVES | 320302 | KRKCC | 354955 | ERGML | 375484 | CGSHL |
| 264441 | LKTEL | 320303 | KIRSF | 354957 | FTQPS | 375485 | MGVPM |
| 264444 | ACLGL | 320309 | TQEAA | 354961 | TGFSS | 375487 | GGGQT |
| 264447 | ERSSR | 320318 | CCWPS | 354962 | DDMQL | 375489 | ELACI |
| 264448 | KVPWD | 320324 | SPPTV | 354964 | SSVHN | 375493 | PGRKH |
| 264451 | DLEIL | 320332 | SIQMK | 354966 | EQELL | 375494 | LVALE |
| 264452 | APTVP | 320337 | KRQKQ | 354968 | LLFRP | 375498 | DFLYF |
| 264454 | SDCGV | 320340 | QETAV | 354972 | VVKLV | 375501 | GAELT |
| 264463 | SDKDS | 320346 | KNRGS | 354982 | IYWWG | 375503 | EEDKK |
| 264474 | ELTGF | 320347 | VHCME | 354988 | SGGWC | 375511 | LVALE |
| 264485 | RHTSC | 320349 | VESGS | 355001 | QTSVQ | 375513 | LVALE |
| 264487 | VHAIA | 320352 | KSKNS | 355008 | DHADL | 375515 | YRAGM |
| 264492 | NGKSN | 320359 | MSIMT | 355011 | METQE | 375517 | LLTSQ |
| 264497 | GSEDS | 320376 | NITLG | 355013 | SDDSD | 375518 | LLTSQ |
| 264498 | MSAKS | 320378 | GQPQP | 355014 | FPPPL | 375519 | ELSQA |
| 264499 | FFDAA | 320390 | PLAIH | 355019 | LGSFL | 375523 | SGRRF |
| 264501 | DKEEH | 320396 | SKLHS | 355022 | DEPAV | 375524 | MSYPK |
| 264515 | ISELL | 320401 | KKKRD | 355023 | TKNNP | 375526 | LTFSP |
| 264538 | ATGFY | 320408 | TVWDG | 355026 | NAPPP | 375529 | LAWQT |
| 264546 | PGTLV | 320413 | SCSIP | 355028 | QLPKI | 375532 | LVRPR |
| 264552 | ALRRL | 320416 | EPPHR | 355033 | ESTAE | 375533 | RERPK |
| 264553 | TGRSA | 320430 | KKKGK | 355041 | EDGTE | 375534 | ACWEM |
| 264554 | VSREP | 320431 | LSHCA | 355046 | MLMIL | 375535 | GLLTS |
| 264555 | QGAEG | 320434 | MDSKT | 355050 | LLENF | 375537 | RQRVQ |
| 264563 | LKTRL | 320447 | TGASL | 355051 | ANYGS | 375538 | VGVYY |
| 264568 | QDIKL | 320465 | FTETG | 355052 | SMAQP | 375539 | RAATE |
| 264595 | KVDCI | 320468 | PSVQG | 355060 | VPLML | 375540 | PARFA |
| 264596 | IIPGC | 320485 | LIGQS | 355064 | SYPGA | 375541 | AVFSG |
| 264597 | ITKSY | 320488 | DDAKK | 355076 | GATCH | 375542 | NNGCQ |
| 264601 | KCCAH | 320491 | WCTVY | 355077 | RSRQH | 375543 | FGLFD |
| 264605 | VAHQS | 320503 | PLHSA | 355082 | DVRQS | 375544 | CQNRF |
| 264606 | EEPPL | 320508 | WLLIA | 355086 | AERAH | 375545 | VTLSI |
| 264607 | FLLHE | 320509 | CKKDH | 355089 | ANRPY | 375548 | QWIPL |
| 264613 | DTKSG | 320510 | NSNST | 355090 | KPVDL | 375550 | FFFSF |
| 264634 | QFVCK | 320516 | KRRHE | 355092 | VALLL | 375555 | NWGER |
| 264637 | NAASP | 320520 | ACCAR | 355094 | AATGN | 375556 | PALPT |
| 264638 | ESRSE | 320532 | SMLNP | 355108 | KYRLV | 375557 | PMHSN |
| 264639 | DDSFP | 320548 | RGAGP | 355109 | AQYAN | 375558 | PPKPM |
| 264640 | PSTAN | 320560 | FSHRQ | 355110 | VGRLV | 375560 | VPGPP |
| 264644 | EANSQ | 320566 | GSRHK | 355114 | AGLWS | 375561 | EPDQI |
| 264645 | SRGSS | 320573 | ADQGC | 355119 | QEPNP | 375562 | CPSQA |
| 264646 | ETDVL | 320604 | PKRME | 355121 | LAAAP | 375563 | IGPLW |
| 264649 | GKFEE | 320627 | KIHMG | 355124 | ASKVL | 375564 | FKGIL |
| 264651 | EVKVK | 320634 | MESVL | 355133 | DEIAV | 375565 | VYSLP |
| 264657 | ATSPM | 320646 | HFHPS | 355136 | KPLYL | 375566 | KLHVL |
| 264658 | CCIIL | 320648 | GALWS | 355140 | SSVTS | 375567 | ATVIH |
| 264659 | SSISF | 320649 | RHLSP | 355146 | GDQEN | 375568 | DVYQE |
| 264661 | SDTFH | 320650 | TFVDD | 355153 | ARGPG | 375569 | SDIDI |
| 264663 | ESYQK | 320657 | GVCGQ | 355155 | RTCES | 375570 | LALPR |
| 264664 | MVVHS | 320658 | KWLQL | 355156 | SFREK | 375571 | LAEFY |
| 264668 | QDIWS | 320663 | PSPSS | 355162 | SLSPK | 375572 | HTHMC |
| 264669 | HWLQE | 320664 | SWFGC | 355166 | PPTNS | 375573 | KVGAG |
| 264670 | VHPPR | 320672 | FAGKI | 355167 | PKEHI | 375586 | SLKLV |
| 264674 | SISHV | 320675 | YENTQ | 355170 | DDTAL | 375592 | ESPLA |
| 264677 | DLDSL | 320679 | CCSSK | 355173 | QVHKV | 375613 | TLAIH |
| 264689 | RPNMI | 320688 | YLLNG | 355177 | GSSQN | 375622 | AVARH |
| 264690 | MQSPA | 320709 | YHDTN | 355178 | IKNIQ | 375629 | TLAIH |
| 264691 | KTQAV | 320718 | ALPKH | 355180 | KVALG | 375653 | LDIGC |
| 264694 | KAGQV | 320721 | QGSID | 355185 | LEAGY | 375660 | PSSIN |
| 264703 | NTIDV | 320754 | TKKKL | 355192 | IPPRL | 375675 | IKIHK |
| 264705 | VLGRF | 320757 | LPVQL | 355193 | EHIEL | 375682 | IGSKG |
| 264708 | YKKGE | 320768 | PIHLS | 355198 | SSSHA | 375690 | FFLER |
| 264709 | YFACV | 320783 | PQAPS | 355203 | APCLL | 375692 | PFTQE |
| 264710 | KSKCC | 320794 | CSSAV | 355204 | KVSHV | 375693 | GPEAW |
| 264711 | LKNIK | 320796 | VNTCG | 355205 | PSGGR | 375711 | LKRKY |
| 264712 | VADHE | 320797 | SYCNL | 355206 | LDWAE | 375736 | YTSSK |
| 264714 | KAKRD | 320813 | NRTKP | 355216 | KTGCD | 375751 | QRSLA |
| 264716 | TLLAL | 320821 | SGAAV | 355222 | IAANS | 375761 | LEAKV |
| 264717 | EPDVQ | 320828 | RGEDS | 355228 | AGDAK | 375767 | RQQNL |
| 264718 | KRNNK | 320838 | EEEQC | 355230 | SLAAK | 375770 | GPLQW |
| 264730 | NQDST | 320848 | EPRPQ | 355231 | QFYNK | 375773 | ELSSY |
| 264731 | KEEGE | 320849 | GEASL | 355235 | LVNDT | 375777 | AKVFV |
| 264734 | VDTRV | 320852 | IGCGR | 355237 | PACDT | 375783 | VMTTV |
| 264735 | RAKYY | 320853 | GTPLP | 355241 | CPSQQ | 375809 | IAQQL |
| 264741 | VQKNQ | 320866 | AKDEL | 355245 | TASAL | 375815 | PHYRH |
| 264748 | IHYQC | 320869 | IKLCP | 355249 | DLLIN | 375820 | SSESP |
| 264753 | VTEGK | 320871 | TKQSI | 355250 | LEAAT | 375826 | LEVDV |
| 264758 | KKSDS | 320885 | GDTTV | 355257 | QCIPS | 375829 | LDAEV |
| 264771 | LPAPC | 320886 | LGKPL | 355260 | QKKSV | 375833 | LGHHV |
| 264779 | DDDDV | 320893 | LLLLE | 355261 | WKEIG | 375844 | AVMKT |
| 264784 | INGRP | 320898 | QRCTK | 355264 | SDEDL | 375849 | PYQED |
| 264790 | LLYRT | 320911 | FRYNK | 355265 | LPPQS | 375857 | DCTMS |
| 264808 | GVADS | 320917 | PKNSS | 355271 | RGLLT | 375869 | TRREV |
| 264818 | VFSVC | 320919 | RGLFS | 355273 | VIPHS | 375873 | LWAQY |
| 264819 | NVMTC | 320924 | PPILR | 355279 | ANKQS | 375892 | ASIRE |
| 264824 | SPEVR | 320935 | PDEND | 355280 | YCGNV | 375895 | GEKAS |
| 264828 | VCFSS | 320936 | EGPSA | 355293 | EAKSD | 375909 | LLELG |
| 264832 | QATPP | 320939 | TQSTT | 355296 | HTINL | 375913 | RLRTF |
| 264833 | TSGDP | 320940 | QLLTE | 355299 | ISLRR | 375924 | GDLCV |
| 264834 | MKRHL | 320949 | GTGAS | 355304 | RKGGR | 375927 | RIRLS |
| 264839 | PCIRS | 320951 | CRRKK | 355305 | KSPEV | 375930 | EETKS |
| 264848 | LLLYE | 320952 | HTAGC | 355306 | DDAEM | 375931 | REKPQ |
| 264864 | FFSSW | 320957 | ASLLS | 355308 | VEKDD | 375932 | PQPCG |
| 264866 | FATVT | 320965 | LRGSH | 355315 | TKLGL | 375968 | SYMHS |
| 264867 | RSLRR | 320968 | MEVLI | 355316 | TTSSL | 375986 | CTDEE |
| 264868 | PEPRG | 321005 | KFVSA | 355319 | DHPAI | 375987 | QRIHI |
| 264870 | RRPSM | 321014 | VSFWW | 355323 | PADGP | 375989 | SRSHL |
| 264874 | TKKGK | 321015 | PGEVP | 355324 | LHQEK | 376007 | GRSGT |
| 264883 | GGVFS | 321017 | PSQRS | 355325 | SGSTP | 376010 | QNLYW |
| 264893 | NASFT | 321019 | RKRLR | 355331 | DTSLL | 376015 | GYLMG |
| 264896 | PLIRT | 321021 | FDSDD | 355339 | RTQVS | 376023 | GLPPV |
| 264903 | LPNRR | 321026 | YYCFG | 355342 | DCGQF | 376037 | FPGKI |
| 264904 | DLDHI | 321029 | FLNLP | 355343 | SWGAN | 376045 | KAILS |
| 264908 | CGGDD | 321038 | VPKTD | 355344 | FSCPE | 376065 | RRETV |
| 264914 | WGPWM | 321040 | FSWFT | 355345 | KCHCN | 376076 | GHSTV |
| 264917 | LPSDS | 321049 | TGKKL | 355351 | YQCKI | 376090 | ELEKQ |
| 264926 | KRNRN | 321058 | EATTD | 355353 | ASQQL | 376103 | IQYDD |
| 264930 | ITIYS | 321070 | PVITE | 355354 | PLTHL | 376110 | ETVQK |
| 264932 | AIRSY | 321077 | KEVRG | 355361 | MMNDE | 376115 | ENGKL |
| 264935 | GCQAC | 321104 | GGSRL | 355377 | PNYFR | 376123 | LGPPQ |
| 264938 | ESTHM | 321106 | YERRR | 355378 | KVTDL | 376127 | LASLL |
| 264951 | SKPSE | 321108 | GGYIW | 355380 | AVALE | 376139 | TDDKL |
| 264952 | VCLLL | 321132 | HLIGY | 355384 | ALLKA | 376148 | GNLAP |
| 264954 | VVKEA | 321133 | HFLLS | 355385 | LEQHS | 376168 | LLLDF |
| 264956 | RRSNL | 321173 | QPLTP | 355387 | YSNEM | 376170 | GLSQY |
| 264968 | KKATN | 321175 | IASLI | 355388 | RVQLQ | 376176 | EDDDL |
| 264972 | EAACA | 321179 | ALSLF | 355396 | GSEGT | 376177 | ENLYN |
| 264977 | SVDEE | 321184 | PGAID | 355398 | AMDSF | 376188 | RGPAR |
| 264982 | KVLSY | 321195 | DSSTC | 355421 | KQSQC | 376200 | LRGGV |
| 264992 | ASNIE | 321196 | QDVSK | 355428 | RSVSL | 376213 | HWPGI |
| 264993 | HSQYN | 321201 | IAAPT | 355429 | VRFVL | 376214 | VLSIS |
| 264995 | SITFA | 321203 | AECCQ | 355430 | SGGVF | 376221 | DSQKF |
| 264998 | TFRRP | 321209 | KQPTS | 355431 | QKAME | 376227 | LSDDD |
| 265000 | NIHSV | 321219 | QKIHQ | 355432 | GKCGE | 376228 | PQLCL |
| 265007 | VLRDL | 321222 | DLREL | 355435 | FSVKM | 376240 | HATEP |
| 265012 | PSWYF | 321239 | SLDQQ | 355436 | FRSLY | 376246 | DDKFF |
| 265014 | RPSHN | 321242 | KKIYC | 355437 | RDDHL | 376247 | STKRH |
| 265018 | KYFSF | 321246 | LQRGR | 355438 | KLTKK | 376250 | FHYKH |
| 265022 | SRSKD | 321249 | DKRAS | 355440 | VMKRD | 376261 | SHISI |
| 265023 | TDGLS | 321259 | AENGK | 355441 | EAYFI | 376265 | SELKT |
| 265026 | SSATW | 321260 | YRRPE | 355442 | RQCGP | 376268 | RWRFC |
| 265028 | GLQGY | 321266 | AASDE | 355444 | VVFPH | 376295 | SPVLW |
| 265029 | LVLPP | 321271 | ASLGK | 355448 | TRGTL | 376298 | RQRTY |
| 265036 | RSFRM | 321303 | AMKKL | 355454 | ALNSY | 376302 | DGFQL |
| 265038 | SDEEG | 321309 | SESTD | 355455 | KCKKM | 376303 | QQAAA |
| 265044 | STGSK | 321316 | CPASC | 355459 | RAYMW | 376306 | DQSSV |
| 265050 | LLVSC | 321320 | RATPT | 355467 | SSSEV | 376309 | GSRRF |
| 265052 | TASPP | 321326 | KKLLT | 355470 | WIYLS | 376316 | WFRSR |
| 265056 | ILQQF | 321330 | DPLPT | 355471 | TLEDR | 376322 | KDTVS |
| 265068 | WPERP | 321334 | MMRNN | 355475 | TSRRR | 376328 | MALCH |
| 265069 | DYDNF | 321338 | NNLCD | 355479 | LRRPG | 376333 | NGGAE |
| 265070 | AAFTK | 321342 | QPEST | 355482 | HQGYY | 376350 | SQTVT |
| 265071 | SDKDS | 321343 | TCSCC | 355484 | QKYTV | 376352 | TFRSA |
| 265073 | AVRKL | 321345 | SLLEK | 355486 | GSSSN | 376354 | KKGKQ |
| 265074 | HFSVA | 321347 | HYSFF | 355492 | KRKKN | 376361 | LPHEA |
| 265077 | QESRR | 321354 | NLSVD | 355493 | MIQLF | 376370 | EDTEL |
| 265080 | PRLPA | 321360 | QMSQM | 355499 | PQSDC | 376372 | CVWQG |
| 265081 | TSLLH | 321365 | NFDDE | 355503 | DPRNV | 376375 | QKSFR |
| 265085 | SFRWN | 321370 | PFHFV | 355510 | PAIPK | 376390 | CCSFM |
| 265087 | SDIRR | 321372 | GGCPG | 355511 | KHLQN | 376394 | PETND |
| 265093 | KYHWP | 321377 | RVFMS | 355512 | QVRPL | 376395 | APPGR |
| 265097 | LPNDS | 321386 | VYSVM | 355517 | NLISR | 376409 | HYNGL |
| 265100 | EKMQE | 321388 | EGIIY | 355518 | MLGPK | 376410 | LCVIQ |
| 265104 | LCDVK | 321389 | KAKGK | 355520 | LAQSY | 376423 | PPKSK |
| 265107 | KKRKI | 321398 | EVHDD | 355527 | DQEET | 376426 | GGCRL |
| 265109 | QSQKK | 321406 | RTHTG | 355529 | DQMCQ | 376436 | PDADE |
| 265112 | AEEEF | 321410 | LEGCR | 355533 | EDQLN | 376440 | YFCII |
| 265113 | SETKM | 321419 | KLFTW | 355535 | GYDTD | 376443 | DRVVF |
| 265131 | RRKRA | 321424 | NATRL | 355536 | MPRKQ | 376453 | CSMDD |
| 265132 | LRFSN | 321426 | FVQKE | 355537 | GESDL | 376457 | TTHLI |
| 265138 | SCPSR | 321427 | DEIHF | 355541 | LQSYF | 376458 | QPRET |
| 265139 | KHEEL | 321445 | CGTTA | 355551 | KPSLG | 376469 | KRKKT |
| 265140 | VMEFS | 321447 | SLGEK | 355555 | AENPP | 376483 | AEECV |
| 265148 | ECKTQ | 321449 | KFRPY | 355556 | FCTIL | 376486 | FGCSQ |
| 265154 | IQSLK | 321455 | ELHSR | 355558 | RCQAR | 376489 | IQARG |
| 265162 | LLESG | 321468 | VQSRC | 355560 | LLVRW | 376514 | ALIVE |
| 265164 | FPKSN | 321474 | PTSRP | 355566 | EDDVE | 376515 | AHSQS |
| 265165 | TAAYI | 321475 | TSGLP | 355568 | KERDS | 376516 | AHSQG |
| 265168 | FYKYK | 321482 | KKTCL | 355574 | TTAKS | 376518 | AHPQR |
| 265171 | MELTQ | 321498 | HILRE | 355577 | PSFAR | 376519 | WSKST |
| 265174 | SLEKA | 321503 | VLLGS | 355580 | GPANH | 376522 | YQGRR |
| 265175 | QQICK | 321504 | ELEEI | 355583 | KEFLS | 376528 | GFAVE |
| 265191 | VEEPY | 321506 | GGKVI | 355586 | LRWIP | 376534 | TFKVS |
| 265192 | KYGNI | 321507 | FSAEA | 355590 | PKHKA | 376544 | HPGQE |
| 265193 | KGKDI | 321514 | REWYV | 355591 | ISSCR | 376551 | DMPAA |
| 265195 | LKELR | 321517 | ICLRS | 355598 | HEAQA | 376557 | TVFKI |
| 265198 | VENSI | 321519 | KMEDL | 355599 | EEGIS | 376564 | ASDLL |
| 265220 | LESLV | 321537 | AILIK | 355601 | GKDVF | 376570 | MTLGT |
| 265239 | RGKKK | 321544 | EQGAP | 355607 | ATAKL | 376572 | ACSIM |
| 265245 | KHLDM | 321546 | RELRL | 355609 | SRVAK | 376582 | SSDTD |
| 265260 | HDQDN | 321549 | TYCVT | 355613 | VTSLF | 376588 | PLRPC |
| 265261 | NLTQD | 321556 | RKADL | 355614 | ILESI | 376602 | GKADL |
| 265271 | RSWRR | 321573 | FKEIL | 355621 | CLKKL | 376611 | EESHA |
| 265276 | SFVVL | 321583 | NNYGI | 355623 | FLDNW | 376615 | EAQAK |
| 265294 | YYMYF | 321584 | EKRLF | 355627 | PLSTA | 376623 | GSCGF |
| 265295 | QCPQQ | 321594 | ETLDT | 355629 | TAEQP | 376630 | SCGCP |
| 265296 | FDHLR | 321606 | ITSLG | 355631 | LHVCL | 376633 | SKLAT |
| 265299 | SDPIL | 321617 | GRPSS | 355632 | LNLQQ | 376634 | TQMPH |
| 265304 | TKEKE | 321625 | SHCTV | 355637 | SFISA | 376636 | ARDPK |
| 265306 | EKNAK | 321627 | VACFT | 355645 | HRKCF | 376644 | TLIDL |
| 265310 | EVYHF | 321630 | PIRRL | 355649 | QAAHF | 376652 | GISTT |
| 265316 | QTMER | 321635 | SCLRH | 355651 | QECGC | 376667 | ISLLK |
| 265322 | EKAKL | 321636 | CPQNR | 355652 | YCCFV | 376684 | GSVEV |
| 265333 | LEFQA | 321641 | MDTAL | 355653 | PEPFL | 376694 | PSTVN |
| 265334 | RFFFW | 321649 | ARWTP | 355656 | KAKGK | 376704 | KLHQP |
| 265335 | GFNVH | 321656 | KDMSP | 355657 | RGERA | 376705 | HNEWP |
| 265339 | SWNDS | 321674 | MKENY | 355670 | LAQVR | 376710 | SKKCF |
| 265340 | CQYNS | 321679 | PRTRC | 355672 | PTVSK | 376719 | WYNKT |
| 265342 | WVGEV | 321684 | SPSSE | 355673 | IPHDA | 376722 | KVRPA |
| 265343 | AKLIS | 321698 | LVPSP | 355675 | TTVWI | 376729 | YCVLQ |
| 265344 | NDFQD | 321706 | KMSSF | 355680 | WNILG | 376734 | KKKKR |
| 265348 | FSTFR | 321715 | EASTK | 355692 | TRTKK | 376768 | SSEDD |
| 265350 | VAGIR | 321729 | SLKRY | 355712 | QWRRY | 376776 | GGGKG |
| 265351 | TIFEP | 321732 | QHRLW | 355715 | AGKVP | 376781 | RPPHS |
| 265354 | STKSE | 321735 | AAESV | 355718 | IATEV | 376788 | CRRAY |
| 265362 | APRSV | 321737 | LVKLA | 355719 | GWSVL | 376792 | SVRRH |
| 265371 | TYSEA | 321744 | YTSSK | 355720 | AAAAP | 376795 | NPKQA |
| 265381 | QPVYI | 321746 | HSVNF | 355721 | MKRLT | 376798 | EKMLD |
| 265394 | DPYVG | 321761 | LDMEA | 355728 | GSWDP | 376822 | KTSHV |
| 265395 | EEETF | 321797 | APEPR | 355730 | LVGKK | 376827 | GTLVS |
| 265403 | KGKRD | 321798 | ISVCC | 355735 | SKVLL | 376832 | REESG |
| 265404 | NPHIA | 321804 | ACPRD | 355736 | ALYYE | 376848 | NNAVV |
| 265417 | SSLLN | 321805 | RENMT | 355739 | RQAQQ | 376849 | LFPGN |
| 265421 | KDRSE | 321809 | HQHKS | 355746 | HQLYI | 376855 | PEEDE |
| 265424 | TRLCF | 321810 | LKCSV | 355751 | ECRDI | 376863 | RFTSS |
| 265428 | GFGQE | 321813 | PGLAT | 355752 | IPQQL | 376865 | SRPPR |
| 265431 | CAGDN | 321821 | NVSLQ | 355759 | KTSLW | 376867 | AKGIF |
| 265433 | LKRRR | 321826 | KWYQF | 355760 | VMTMV | 376870 | ASPHS |
| 265437 | QHFQN | 321834 | SKATF | 355765 | SSHEA | 376879 | PTPKS |
| 265440 | DGDEL | 321835 | GGYSY | 355767 | TLQGE | 376894 | DWVYE |
| 265441 | WTTAT | 321844 | SPTHC | 355772 | NTNRD | 376898 | MPGRM |
| 265447 | CGGND | 321845 | RQLLS | 355775 | AFGNF | 376910 | PSKLI |
| 265450 | AGHHF | 321874 | QTQIY | 355777 | VYYTR | 376937 | PGHSL |
| 265459 | KEYYV | 321876 | PIIQK | 355778 | RGERA | 376946 | SEDEL |
| 265462 | IISQL | 321891 | RIHSR | 355785 | RRLQP | 376952 | LDSAD |
| 265465 | QVVRI | 321903 | DAYTA | 355786 | SFCYR | 376956 | LVAML |
| 265471 | PAIEV | 321936 | QTQTY | 355789 | EEWVL | 376966 | IPSIL |
| 265498 | LRRQF | 321951 | GTNRE | 355790 | LKMLS | 376968 | IEATA |
| 265500 | RNGLE | 321962 | DYLKV | 355799 | RDSYS | 376996 | WSGLR |
| 265512 | TILIF | 321963 | TPEAS | 355800 | APQEA | 377007 | LYPRC |
| 265517 | SSGWF | 321971 | LVKSQ | 355810 | RRFIT | 377011 | KIYEV |
| 265523 | CCSRK | 321973 | HHLPI | 355812 | LEDVA | 377012 | QIQRM |
| 265526 | LAVMQ | 321976 | SPGGP | 355815 | AESDS | 377021 | CGKDI |
| 265529 | QAHRK | 321984 | KKIIY | 355825 | ALIND | 377042 | FIVRI |
| 265537 | FLVQD | 321988 | FRSEL | 355827 | LRNRK | 377043 | SFLPT |
| 265538 | GCLVL | 321997 | SDNSH | 355831 | TSTRL | 377054 | EVEER |
| 265560 | SMDTN | 322007 | GAKPG | 355837 | CCVLV | 377055 | AGKQH |
| 265562 | TLNKT | 322016 | SDLSA | 355840 | QNRGY | 377061 | MALSS |
| 265563 | GNLGQ | 322020 | QDPQA | 355843 | MEEDP | 377069 | LTYFP |
| 265564 | VGFLG | 322049 | GNTVV | 355865 | HWFDV | 377073 | TFTWW |
| 265565 | LEKLD | 322057 | DAFLG | 355866 | VETVV | 377074 | QLAAA |
| 265572 | MNKPV | 322061 | AAETQ | 355867 | RKETA | 377076 | LFFFT |
| 265577 | ELLNA | 322087 | HVLDV | 355870 | ALGCL | 377086 | RERNN |
| 265579 | YFPSG | 322088 | IHTRF | 355871 | STYYL | 377094 | SSTAS |
| 265593 | DDKCQ | 322097 | CAPFP | 355877 | YLLGQ | 377102 | SAERS |
| 265594 | KRESE | 322122 | FTMAL | 355880 | VYRMV | 377137 | SEDLE |
| 265598 | GYQRI | 322133 | TDEDD | 355884 | NELKL | 377141 | QLNNR |
| 265603 | FYTSA | 322142 | KRKKK | 355890 | FGRSY | 377142 | TIPEK |
| 265605 | ITVKH | 322156 | LRRRF | 355893 | NRTHF | 377147 | KRIIF |
| 265614 | FLQKF | 322159 | EFVLL | 355895 | MEKQK | 377148 | PQSWQ |
| 265616 | KEQTN | 322161 | QRCWC | 355896 | SCKCS | 377157 | IFNIF |
| 265619 | GKIAL | 322170 | RKKGS | 355899 | SDSDT | 377176 | CPLDV |
| 265627 | LYCEL | 322180 | RRPIS | 355900 | AGQIV | 377187 | LNTKL |
| 265634 | RLLDL | 322191 | NRTKP | 355902 | AGKSA | 377191 | YSTCL |
| 265641 | SNSKK | 322192 | LAPVA | 355906 | REEKC | 377195 | FEGGD |
| 265643 | DIERS | 322206 | IRIFS | 355908 | DRFYF | 377197 | KGITL |
| 265651 | CSRLF | 322218 | AAGPK | 355910 | TDTHL | 377204 | TSSWR |
| 265686 | AATDD | 322234 | DFTER | 355917 | IENIK | 377206 | TPDLR |
| 265689 | RKLGV | 322238 | TAGKD | 355920 | DIPLN | 377225 | KYTIR |
| 265707 | DDVGH | 322242 | VVHTK | 355922 | NCKVQ | 377233 | LLRNV |
| 265708 | SEPKG | 322249 | ELQAV | 355923 | NSRLI | 377244 | QEPAL |
| 265713 | PYMRR | 322252 | EQRDV | 355924 | EIESH | 377252 | QNGES |
| 265715 | RTLAS | 322265 | TPVQA | 355925 | FNNSF | 377256 | FPAPL |
| 265717 | VEPTA | 322273 | KEEEV | 355927 | AELMR | 377263 | KEQIP |
| 265720 | DHYGI | 322276 | NIVML | 355929 | FRLEL | 377265 | EKHRK |
| 265723 | GTQNL | 322280 | ADLMY | 355930 | EPSGT | 377279 | KDFDV |
| 265724 | GTKRQ | 322287 | PLRGA | 355938 | SESAI | 377280 | GHVAA |
| 265727 | WETSI | 322295 | HSIDK | 355941 | HLLQK | 377297 | SLPGH |
| 265728 | TFTGF | 322300 | KTSKT | 355944 | INLDT | 377303 | CRGAE |
| 265732 | QRRRI | 322304 | YRLIG | 355955 | IKDEF | 377311 | VPKPH |
| 265734 | ELNTA | 322316 | LSERL | 355958 | HSTEL | 377337 | LGGFS |
| 265742 | QVHLV | 322323 | FKPMK | 355961 | AYTRF | 377339 | SPGTP |
| 265753 | QKEQE | 322339 | LVVMP | 355963 | YHCLF | 377344 | KLNKV |
| 265758 | RKPRF | 322354 | PFPVT | 355966 | ILGMR | 377345 | LTGSF |
| 265769 | SNPKA | 322356 | LQSEH | 355968 | PESSL | 377355 | SVTTV |
| 265773 | GTDDE | 322373 | DDSSD | 355969 | APKAD | 377370 | AGSLV |
| 265782 | KKAKP | 322376 | KKNKH | 355970 | PATAS | 377372 | DQEHA |
| 265801 | IATEI | 322395 | GEGKK | 355972 | QSSLH | 377374 | LGKMH |
| 265806 | GPLPP | 322396 | GKRRK | 355979 | KGSKI | 377375 | HVSDG |
| 265807 | LELFE | 322408 | DEQQL | 355980 | QPAEE | 377381 | TPVEN |
| 265825 | CIWEF | 322417 | VVSHT | 355986 | ALLES | 377383 | PGHVD |
| 265827 | SKALV | 322418 | VLRSV | 355987 | ITGEK | 377385 | RELSQ |
| 265836 | HSAVL | 322419 | FGLFD | 355988 | ALPPQ | 377386 | TSLFP |
| 265838 | LIQKL | 322421 | TSKYR | 355991 | DNLMI | 377390 | VNGPV |
| 265840 | GLINM | 322422 | GLTTT | 355996 | RQHAS | 377393 | TYISR |
| 265843 | KESEL | 322424 | ISAPV | 355999 | PPPPP | 377401 | PVQKV |
| 265846 | FKHKP | 322426 | KLVLN | 356001 | QRIYE | 377407 | STGPL |
| 265849 | VISQN | 322427 | TGEKP | 356005 | LQAPG | 377414 | EWVCL |
| 265854 | PHLVK | 322435 | HSQPL | 356006 | VQLAL | 377416 | QIPVF |
| 265857 | PIELD | 322439 | NIKWG | 356015 | CVQRE | 377417 | QPPKW |
| 265866 | WRGMY | 322440 | EVTMI | 356017 | SRVLP | 377428 | QPADL |
| 265870 | FFHLN | 322450 | RQAAS | 356024 | YNPAS | 377435 | GQDSQ |
| 265872 | NGASV | 322453 | GTVCE | 356030 | KTLRL | 377446 | KRKML |
| 265881 | EKTVS | 322457 | STCCP | 356033 | KESYI | 377451 | VLAPY |
| 265896 | KYMVH | 322460 | PPSKV | 356037 | LDKEL | 377470 | SCTII |
| 265909 | MGVSS | 322469 | TGDQV | 356038 | GNTGQ | 377473 | SADDV |
| 265922 | TAKLC | 322498 | SEPSS | 356040 | PASTC | 377479 | QDRVP |
| 265944 | LVQQS | 322524 | GQTST | 356047 | QEGAD | 377486 | ASKRS |
| 265960 | KSGQQ | 322527 | QAQVS | 356054 | RNPGP | 377492 | QESWK |
| 265963 | LMKKT | 322530 | ASPTH | 356056 | FGLSI | 377494 | PRVSV |
| 265965 | RNGGL | 322532 | QGPLD | 356058 | INVPA | 377496 | EPTPM |
| 265968 | VEKKE | 322542 | PDPTW | 356062 | KFYKL | 377499 | GAHGF |
| 265969 | RGMSI | 322544 | SRVTA | 356063 | MEETE | 377502 | THFLL |
| 265970 | AATYL | 322545 | EENLW | 356064 | TQRLK | 377504 | VFSQL |
| 265978 | GPLNP | 322546 | CFWKD | 356066 | MKIRN | 377533 | KEKRR |
| 265981 | QPHRP | 322568 | LVFTY | 356067 | SLTQK | 377537 | TSPES |
| 265983 | LGCTH | 322569 | KCLIR | 356070 | AALAH | 377545 | DPNEV |
| 265986 | MAAKL | 322579 | KSGEP | 356071 | KDLEN | 377547 | GCFDR |
| 265990 | MHSLK | 322582 | STHRR | 356076 | PKLIS | 377551 | SKRLA |
| 265992 | PCFER | 322591 | ACCLH | 356086 | SPITR | 377558 | PGGRF |
| 265993 | NLETM | 322593 | HAFCY | 356087 | APPDV | 377566 | SIAEP |
| 265997 | PFRWS | 322594 | KECFC | 356093 | DQVAM | 377567 | NSFVR |
| 266000 | LSDSD | 322608 | VDMEI | 356094 | ETIIF | 377571 | SRLIS |
| 266003 | QHAAK | 322609 | NNVQV | 356099 | GSGRR | 377572 | NTFGY |
| 266014 | ISNIK | 322617 | VLWNT | 356104 | HLHKL | 377576 | QPSCC |
| 266022 | YKELD | 322628 | GKKRR | 356105 | TDVGD | 377577 | DTGTF |
| 266025 | APPTL | 322629 | VIAYN | 356110 | PSGED | 377582 | ASSCC |
| 266031 | RKSMW | 322640 | RCLAS | 356111 | SNPEP | 377583 | RTSSC |
| 266037 | GRGEQ | 322649 | TPWRC | 356113 | AKYSA | 377585 | CEPRC |
| 266041 | WSVEL | 322652 | DAEED | 356115 | ECYQR | 377588 | ISSKI |
| 266058 | CALCA | 322693 | DVPLQ | 356116 | QIGQL | 377596 | TAELP |
| 266066 | AAEPH | 322697 | ASQMS | 356121 | KSLFG | 377603 | EIPAK |
| 266068 | DHERK | 322706 | SNGEH | 356123 | CVSDS | 377604 | EIPAK |
| 266069 | IEEPK | 322716 | RAYIH | 356125 | CSKLT | 377612 | DKGSS |
| 266070 | TASQA | 322724 | KTKQI | 356130 | LDDST | 377617 | GVATN |
| 266077 | QRFLD | 322727 | VSWVY | 356133 | LKDYV | 377626 | IKFGH |
| 266079 | IKNTF | 322730 | ICGVV | 356134 | ENYRL | 377640 | VGGKR |
| 266081 | STFVA | 322754 | VGGAQ | 356135 | GGLQQ | 377653 | YQSSK |
| 266082 | PSSKC | 322775 | DQVLH | 356140 | IYSLA | 377655 | KGSSS |
| 266085 | NATDP | 322784 | GKKLF | 356142 | SHGKS | 377656 | PLPSA |
| 266086 | HGYYA | 322788 | NCRKN | 356143 | LSQNS | 377657 | RGQHT |
| 266088 | HAYFA | 322791 | AQMRV | 356146 | ETEGT | 377665 | IDDRK |
| 266116 | GFGKS | 322801 | FTYDK | 356150 | KVFIA | 377672 | GQHGH |
| 266119 | METSP | 322802 | VSQSN | 356155 | SHGTL | 377678 | VKPFS |
| 266123 | ATSIL | 322804 | APRFS | 356156 | VLKQC | 377696 | EMKKP |
| 266126 | DDHVL | 322807 | PESLR | 356159 | YTMRV | 377702 | FAEVT |
| 266157 | LSSLP | 322823 | NSHNF | 356169 | LHHRL | 377716 | NPPPA |
| 266182 | GGKGN | 322824 | NKEGK | 356175 | DRGSW | 377727 | SVGKE |
| 266214 | GAPTL | 322832 | SYRPF | 356177 | QSVSN | 377744 | IKILY |
| 266254 | LTTWK | 322837 | FRKTD | 356180 | EMIIS | 377746 | PNTYH |
| 266263 | KPSSS | 322851 | RVQTP | 356182 | KLLTH | 377747 | NVRKT |
| 266269 | GPEGK | 322858 | ASVEV | 356186 | LLPDE | 377751 | KSKRK |
| 266304 | KYGPL | 322866 | DKGAG | 356188 | LETSV | 377778 | PCVIL |
| 266383 | QMKTL | 322872 | EGSLL | 356191 | IGRFT | 377783 | KTKNS |
| 266395 | QFGII | 322883 | DDSFS | 356198 | CCTWN | 377786 | GFAVE |
| 266397 | PKVEL | 322885 | CLEQQ | 356202 | ISQKV | 377788 | GCRLY |
| 266427 | QEDEC | 322887 | ATHNE | 356207 | SAFRD | 377793 | TNIQS |
| 266432 | SSVSQ | 322898 | IVPPM | 356211 | FSLRA | 377796 | GKAVK |
| 266458 | SVYGK | 322899 | NLARH | 356213 | EELEK | 377799 | SVKKI |
| 266482 | KKSEC | 322915 | VELSD | 356214 | AFPDS | 377804 | VYVLW |
| 266483 | QRFMW | 322924 | VRCRC | 356218 | MRFTY | 377813 | SEPGT |
| 266497 | GNSII | 322939 | KEIRS | 356224 | GPPPL | 377814 | RGLTI |
| 266503 | IQWTL | 322944 | KFCKA | 356230 | VLREK | 377823 | MEVSC |
| 266505 | VWYVR | 322946 | GSVNK | 356231 | RVSHE | 377831 | QLNGN |
| 266508 | KRLKR | 322956 | ENCQL | 356236 | LGKNK | 377836 | FFLVH |
| 266517 | LKVPE | 322957 | QYRHH | 356239 | DTQEL | 377858 | IGGGP |
| 266524 | CLAVV | 322991 | WMFPV | 356243 | FHPDV | 377862 | AEQYV |
| 266529 | EELSD | 323012 | PALLS | 356247 | FASHV | 377878 | ILFAM |
| 266534 | STPTN | 323034 | ASPHF | 356251 | LGTPC | 377904 | LPDLL |
| 266542 | MNGKN | 323036 | SYGNI | 356256 | YRQYQ | 377927 | PVCFK |
| 266544 | KTVNI | 323046 | RLAES | 356257 | HPIPG | 377934 | RKNPL |
| 266546 | PPHRY | 323047 | AETLP | 356259 | LQLLH | 377936 | QDKVN |
| 266551 | DQALF | 323055 | PSLAA | 356263 | YDGPL | 377941 | GESDL |
| 266556 | VSQPS | 323063 | SAANF | 356265 | LQATL | 377954 | IYLVH |
| 266557 | PACSP | 323065 | GAPSS | 356272 | GRVFF | 377958 | VVNTR |
| 266560 | FRKVR | 323068 | KLVKS | 356278 | GTLVS | 377963 | ENTAF |
| 266579 | NSKHH | 323071 | AVPKL | 356290 | VKGLF | 377964 | NHYRR |
| 266580 | SSGVP | 323075 | LPDSY | 356309 | LKPTE | 377980 | QDHPE |
| 266581 | FVAST | 323076 | GQAAQ | 356311 | IISQV | 377995 | ICEWQ |
| 266594 | NLNNY | 323077 | QGLWE | 356319 | RIQWV | 378009 | CSCCD |
| 266604 | KGLAW | 323087 | EYVPR | 356320 | ILPGI | 378029 | SAWQL |
| 266643 | RVTTV | 323096 | GPMTT | 356324 | LFPHK | 378041 | RNRPY |
| 266646 | ACGCS | 323099 | EVECG | 356329 | QVSIS | 378072 | SSKVQ |
| 266659 | LVLLD | 323147 | PRRRR | 356331 | HAKRA | 378089 | SGCKS |
| 266671 | TSNSA | 323148 | LKSCV | 356351 | YRATN | 378112 | GTEEV |
| 266673 | FWPRG | 323155 | CSPKA | 356354 | SRDEL | 378118 | QNLKP |
| 266674 | FVPCL | 323172 | EFSIF | 356355 | CTASS | 378127 | RGRGH |
| 266679 | EYRHR | 323178 | SNPKM | 356363 | SYFYV | 378132 | GMSDI |
| 266682 | PESDL | 323183 | TVLLD | 356366 | YPFSQ | 378137 | CVMSV |
| 266688 | YGLVA | 323184 | LRLCR | 356370 | MERLI | 378145 | LNEKN |
| 266712 | ILNGE | 323191 | HMRKR | 356374 | RHLFS | 378161 | FSIRY |
| 266718 | EVTLN | 323194 | MSIES | 356375 | NEHHS | 378164 | TALQG |
| 266719 | QAVII | 323199 | DKKKD | 356379 | LGIPY | 378172 | SQGLP |
| 266732 | RGNKH | 323217 | PRRRR | 356382 | EPLRT | 378174 | LRPYK |
| 266735 | GEMRE | 323224 | KSYSM | 356384 | YPICE | 378181 | GPGGS |
| 266736 | LIYKT | 323241 | AAFEA | 356385 | SCEEK | 378190 | PPFSE |
| 266742 | LRAHF | 323246 | SGGAD | 356386 | YPRCE | 378191 | NSGIK |
| 266743 | QSMLF | 323252 | KDDAS | 356389 | DKTCI | 378201 | HLKRT |
| 266744 | FTNWF | 323264 | VQGYS | 356395 | YPRCE | 378203 | RSPNI |
| 266746 | LQQVA | 323275 | TELKS | 356399 | TCAKR | 378210 | AIQDG |
| 266754 | KKPRK | 323280 | DISAA | 356404 | HRKLH | 378213 | LLSTA |
| 266813 | KPPWK | 323288 | DWQKD | 356405 | SHLRF | 378244 | AAPLQ |
| 266839 | ESEGL | 323300 | LEFLS | 356410 | RKEFQ | 378248 | FRWFF |
| 266880 | TRFKN | 323302 | VQQKS | 356411 | TLDMI | 378260 | VPQGM |
| 266919 | SMSTN | 323304 | DSEQN | 356421 | AQETK | 378261 | QLPES |
| 266970 | PHLRL | 323313 | KKEEL | 356429 | ANSLK | 378262 | GRSSR |
| 266971 | VYVSP | 323327 | ESCLA | 356430 | VAIWL | 378279 | QKKET |
| 266980 | VTTEG | 323328 | IKIPK | 356431 | LKIQK | 378288 | FPTSP |
| 266987 | MAGSK | 323338 | LPVIP | 356432 | TKLCS | 378289 | GAGHQ |
| 266988 | PAKAL | 323339 | ITGSY | 356433 | DIYKR | 378293 | SETAL |
| 266991 | EELLG | 323348 | RHRRY | 356434 | HNISI | 378295 | SLKKH |
| 267008 | PKVIQ | 323354 | KIYFS | 356435 | PSILQ | 378296 | GALAE |
| 267012 | ENPQL | 323355 | VLVVK | 356436 | SKPKA | 378298 | RLNAV |
| 267015 | FHRLH | 323362 | EHPAD | 356437 | GPEAM | 378306 | NHTAQ |
| 267017 | RFGKK | 323374 | TDGGC | 356438 | RSTEL | 378311 | KNNSS |
| 267023 | RSSKR | 323377 | AKLLK | 356444 | SSQSR | 378312 | GLQEK |
| 267064 | VPPPQ | 323387 | GPRKS | 356448 | RGNIN | 378313 | FPQEA |
| 267079 | ASLPP | 323421 | NPNEQ | 356452 | WYNCP | 378317 | AIVGQ |
| 267082 | DSPTL | 323423 | KLLNL | 356465 | KSQCC | 378320 | IPREL |
| 267101 | NAQRT | 323424 | NPPTD | 356468 | KIFQF | 378323 | SSNIQ |
| 267102 | KTQHQ | 323427 | PPGFK | 356470 | LNYRI | 378324 | QCQTA |
| 267103 | LPQIS | 323433 | DQVCT | 356473 | TEELE | 378329 | VSASE |
| 267115 | KKEKK | 323435 | LPPMP | 356476 | GCRRW | 378332 | LKLFG |
| 267116 | GCYSE | 323439 | DDDQR | 356480 | TKEHK | 378338 | REKKQ |
| 267119 | KKTSR | 323447 | AGRRE | 356481 | LPSEE | 378345 | PQDNV |
| 267122 | GQFSL | 323455 | LLLDL | 356482 | EKDEL | 378346 | TANYF |
| 267129 | VPEAG | 323479 | TTCHY | 356492 | SRDEL | 378349 | YHDEL |
| 267163 | NKEEK | 323500 | LPPTT | 356509 | RKKGK | 378350 | SSVTP |
| 267169 | YLRED | 323507 | VTVQE | 356515 | RPQAM | 378357 | LDVWS |
| 267176 | NLSNA | 323511 | QFSEG | 356520 | GGGGY | 378359 | CILLL |
| 267197 | RGTLN | 323516 | PRAPA | 356529 | EPSHT | 378364 | RGYVK |
| 267199 | MEKPF | 323527 | DLITL | 356530 | ASPGC | 378366 | TGVQV |
| 267202 | GFILQ | 323549 | DTDMR | 356531 | IKKEK | 378396 | KIGII |
| 267205 | LCLLL | 323555 | CNIFV | 356532 | GRTLG | 378400 | DEDEE |
| 267260 | SSTRR | 323557 | ASAKT | 356534 | HYCMD | 378407 | GPTAE |
| 267273 | ILKWD | 323568 | ATETV | 356536 | PKSSP | 378414 | GIRNT |
| 267291 | EGKKR | 323571 | PIRRH | 356540 | CPCLK | 378426 | KAKRH |
| 267294 | VRTIH | 323580 | DLLPE | 356541 | KPEEN | 378430 | QAGES |
| 267328 | SGCCA | 323584 | ELEKQ | 356548 | EGLKL | 378446 | LDQVN |
| 267339 | LHHGS | 323586 | NRKRQ | 356549 | AIVAF | 378461 | KFSPY |
| 267377 | RITTL | 323587 | LLFYR | 356552 | PTPDR | 378463 | RGTKF |
| 267383 | EPPAP | 323588 | PLSHM | 356560 | FLVFG | 378468 | RGIQV |
| 267396 | DLSVL | 323595 | RQDSR | 356562 | DEANT | 378474 | GPLNY |
| 267406 | LIFPL | 323606 | FLSKK | 356563 | QQLEK | 378476 | FEVKS |
| 267407 | SQLLT | 323612 | FINKL | 356567 | TTGKA | 378479 | NAHSS |
| 267415 | SSRPL | 323633 | VAYNM | 356571 | PQLTP | 378491 | VTSQL |
| 267422 | PQKVG | 323635 | KKKVE | 356574 | GHPAA | 378495 | HLSQR |
| 267425 | SILED | 323645 | YSLKI | 356579 | RMLLV | 378510 | NTADH |
| 267426 | SRKHN | 323663 | AVDSG | 356581 | HSTKF | 378515 | TSWSL |
| 267430 | LKSDI | 323670 | TAGLA | 356587 | DSPML | 378516 | NCLSQ |
| 267434 | ATDKS | 323678 | VNSKL | 356590 | PKKGH | 378517 | SSEVN |
| 267436 | QRFEL | 323680 | FSSPQ | 356591 | CRYVF | 378524 | NGLIK |
| 267460 | QGPID | 323686 | RSNPF | 356595 | DVVQR | 378529 | FTRIR |
| 267483 | LSKSN | 323687 | CTEDK | 356599 | NYFLS | 378533 | DSLLQ |
| 267484 | KRHAE | 323688 | FHTKK | 356602 | TTGRE | 378534 | ESDGD |
| 267485 | SEDEF | 323694 | SCTLA | 356607 | LMTFE | 378546 | FEHAT |
| 267499 | AHSSG | 323696 | LEETS | 356608 | RTLEG | 378565 | VEGEA |
| 267502 | GIRWE | 323697 | VLTFS | 356620 | FPFRQ | 378578 | LTKTP |
| 267512 | SHSRV | 323714 | NKFVV | 356623 | SRVSC | 378599 | GEKKP |
| 267522 | RRKKQ | 323720 | PGGRP | 356630 | VLEAY | 378617 | RHYTS |
| 267540 | TMFAW | 323732 | SLKLM | 356632 | ILLQD | 378619 | QGYLC |
| 267549 | LEVLE | 323740 | RESPF | 356634 | AEENQ | 378621 | SLASF |
| 267550 | AIFTQ | 323765 | VGDAK | 356635 | PFSHL | 378624 | GFSLI |
| 267568 | EEISL | 323777 | QPEDV | 356641 | VLELV | 378629 | TKVFS |
| 267569 | QLEKK | 323780 | RDENQ | 356642 | TLESH | 378630 | SESTH |
| 267584 | NPEAQ | 323782 | GERKR | 356647 | TPSIP | 378635 | TLLAS |
| 267594 | VFGYL | 323795 | QTEGR | 356650 | QRATW | 378648 | FEECG |
| 267620 | SQYPF | 323807 | GNGDG | 356652 | GDTEF | 378649 | QTRPH |
| 267622 | DLLKQ | 323811 | TRSNM | 356655 | SSMEK | 378653 | KQQLA |
| 267750 | GGLLL | 323816 | CTFLP | 356658 | NSCSI | 378657 | RRESF |
| 267803 | HTPLI | 323821 | RHTQK | 356671 | NPCVK | 378669 | SNHAY |
| 267812 | KRKTT | 323822 | TLQHN | 356674 | TTGPD | 378680 | AHPGD |
| 267814 | SDQNP | 323827 | KRSFL | 356678 | HPQII | 378685 | PTRKE |
| 267837 | HYENF | 323830 | YNHFC | 356685 | DDTSN | 378699 | QIKKM |
| 267838 | SLYHS | 323834 | DLCCP | 356687 | RQKMS | 378702 | DSDSG |
| 267842 | KTLKL | 323837 | DKYGY | 356689 | LAWTL | 378718 | CLKQH |
| 267843 | PMAIT | 323846 | VLKET | 356694 | GLYKL | 378733 | ENKEQ |
| 267845 | LQAMV | 323847 | FFKQN | 356696 | VSGHI | 378741 | QAQQA |
| 267857 | YGTEL | 323856 | ESAVA | 356700 | KTTRQ | 378750 | HSPGF |
| 267859 | PKNEQ | 323879 | EHPSD | 356708 | KDLLK | 378758 | RPVSS |
| 267869 | SNTTE | 323880 | VGAFL | 356713 | SKEFS | 378774 | MGEKS |
| 267884 | ATAAQ | 323881 | NAVDY | 356723 | SLWRG | 378782 | VPKIH |
| 267889 | SGYSS | 323889 | ICSPK | 356729 | FLVLT | 378784 | TLCSV |
| 267918 | GEDDD | 323890 | ALSLP | 356732 | QDLRS | 378792 | PQEVF |
| 267935 | MSSLG | 323895 | HVPES | 356734 | VPTVN | 378796 | FRSEL |
| 267938 | PKEDG | 323901 | GETTV | 356737 | AALAT | 378798 | KEALM |
| 267950 | ILKKK | 323913 | NSLNE | 356738 | WMFAL | 378802 | RFVHT |
| 267953 | LKQYC | 323926 | ANKIK | 356744 | EDNNW | 378812 | ANGLA |
| 267970 | GGTYA | 323927 | EAEQC | 356761 | EGDSP | 378813 | PAGHM |
| 267973 | YDCPI | 323929 | VLGNF | 356770 | GCDIY | 378817 | AEEDY |
| 267974 | TRYYC | 323945 | ECEGS | 356775 | VTLIE | 378820 | QSTSL |
| 267978 | QPPPH | 323952 | KAIYE | 356779 | TDHYN | 378836 | SPKNC |
| 267984 | SNSVN | 323967 | DEKKE | 356785 | KILDN | 378837 | HLQPR |
| 268035 | QSSTC | 323978 | HLEIT | 356789 | IEVKS | 378845 | LQELN |
| 268042 | VSFIL | 323982 | RQDSR | 356791 | EFANV | 378848 | PGRDY |
| 268053 | EATQQ | 323986 | LPILH | 356792 | VTLTG | 378851 | PHSYH |
| 268057 | QIREK | 324000 | KTGCF | 356793 | VTLTG | 378856 | THVQT |
| 268058 | ASQQS | 324020 | KRSES | 356795 | SSLDG | 378857 | YNWYD |
| 268070 | PPPNS | 324025 | GKRKR | 356807 | STQVE | 378865 | KHLAC |
| 268074 | PCFSP | 324056 | ATGLE | 356811 | TEIKE | 378879 | NYLEG |
| 268079 | VMQDT | 324060 | ILRIR | 356814 | NEDEE | 378885 | EESGE |
| 268097 | EFEQT | 324064 | KAYEV | 356825 | VDNHF | 378906 | IIVGG |
| 268099 | AFQGN | 324074 | EEEDD | 356830 | QDTKM | 378912 | VPLLV |
| 268122 | VPLVP | 324088 | GAGHT | 356832 | TDSFL | 378936 | PQFHY |
| 268124 | SQPGP | 324101 | KLEHY | 356834 | APEEG | 378937 | LLGRV |
| 268129 | EADLE | 324103 | PVDCK | 356836 | ASKAQ | 378951 | CQPPE |
| 268130 | ENFKK | 324105 | NPKAK | 356842 | DHLDQ | 378957 | KIRRA |
| 268134 | PSTAH | 324111 | RIVNI | 356846 | FSSLS | 378958 | ASPHS |
| 268138 | WLEDL | 324122 | GLMST | 356848 | GLLLC | 378969 | QGKSM |
| 268148 | RHCCT | 324124 | APLEK | 356849 | MAESN | 378985 | NPFLL |
| 268150 | ELLGC | 324127 | KQKVT | 356853 | SSRPH | 378986 | PDPHA |
| 268154 | YYNVL | 324173 | EKDEL | 356856 | SGKFS | 379003 | RGARR |
| 268159 | NQDGE | 324175 | LEDPW | 356858 | PKCCH | 379008 | YAYFA |
| 268164 | CDGAT | 324191 | SQIKK | 356873 | GNMYF | 379028 | MNLNL |
| 268171 | DQSAL | 324196 | ESKEA | 356879 | QELIK | 379029 | DIASN |
| 268182 | KFYGK | 324203 | VGELI | 356885 | VPQCA | 379034 | LQTSL |
| 268184 | RADRL | 324204 | GVSQQ | 356898 | QQGDE | 379035 | ATPGE |
| 268206 | LSKNK | 324241 | VYYIN | 356905 | CSLSW | 379038 | LPPQQ |
| 268220 | LVHRE | 324243 | IPVTS | 356906 | VDVLP | 379045 | TTRKL |
| 268251 | LADFK | 324248 | GFMRF | 356908 | QKESE | 379047 | LFKAS |
| 268261 | ELLFS | 324251 | TISLL | 356909 | PVLSS | 379048 | FLYKI |
| 268271 | ESPEK | 324270 | QPSTA | 356912 | AYLCL | 379059 | PEGLL |
| 268281 | LLIQS | 324277 | AGLFF | 356919 | PESLQ | 379065 | GKPKE |
| 268297 | NVPLS | 324301 | LASCL | 356920 | QTGKI | 379074 | LGHWV |
| 268314 | ARVPA | 324302 | MKHKC | 356925 | TPVES | 379078 | PPVNT |
| 268333 | SRSSS | 324304 | DTYCA | 356937 | DQNRI | 379114 | GNKEN |
| 268349 | LEAKP | 324318 | CLKLA | 356940 | STKSL | 379121 | RAENS |
| 268379 | FVDEL | 324323 | GCFYY | 356941 | VKTNI | 379122 | PGTWK |
| 268383 | LSSHS | 324331 | FLFFF | 356946 | DPQDK | 379140 | SPGDV |
| 268389 | NYERP | 324343 | TIVKE | 356951 | RPAKS | 379145 | FLHWL |
| 268459 | HFYQT | 324352 | PGSSR | 356953 | GLAAM | 379146 | GGESM |
| 268482 | ARFGL | 324369 | VIRKG | 356954 | YGDMA | 379158 | KPKDD |
| 268483 | LYQDI | 324392 | NGAEI | 356959 | QEICS | 379168 | AKHRN |
| 268489 | DTFRL | 324403 | PQGHN | 356966 | SITVG | 379173 | HKEKN |
| 268509 | MASLD | 324404 | KIAWN | 356969 | QPATQ | 379174 | SLITV |
| 268533 | ATSRL | 324414 | TMKNN | 356971 | TTMPS | 379183 | STVEF |
| 268595 | AKGKK | 324419 | LVEKR | 356972 | GEVDR | 379198 | SDSDD |
| 268603 | FDDDS | 324423 | NWRAD | 356975 | WAGRK | 379201 | SKFPS |
| 268605 | ESEDS | 324435 | SPFYR | 356982 | EKCNQ | 379203 | LLEFK |
| 268607 | MKLSV | 324444 | THHLP | 356984 | LQALP | 379209 | DSRRH |
| 268613 | SLACL | 324445 | SRALT | 356988 | GHPLS | 379223 | PAPTQ |
| 268616 | LDSTD | 324450 | GGKAS | 356989 | GVLVS | 379227 | TFGLE |
| 268624 | GKFRN | 324458 | LKDKA | 356990 | ILDFI | 379253 | DRPRL |
| 268638 | QQITV | 324463 | RTKYI | 356991 | RGHLV | 379259 | PTVRY |
| 268655 | LHHGD | 324464 | SVVHR | 356992 | KGEGL | 379265 | CCSIM |
| 268661 | TSGDL | 324468 | KKVFL | 356999 | KNDSN | 379279 | LLHYN |
| 268668 | AAATS | 324469 | RRWGQ | 357004 | LEKES | 379309 | IKRGR |
| 268674 | SGSNH | 324491 | TLKPL | 357008 | LLFYR | 379313 | LLSYS |
| 268676 | PDVEA | 324510 | MEADP | 357012 | FDVYS | 379326 | ETTHF |
| 268679 | DTVPR | 324511 | QSDAL | 357022 | YENVI | 379330 | ARNQT |
| 268695 | CLWSH | 324517 | PTSIS | 357025 | GLLLT | 379336 | HHEWP |
| 268699 | VGTPT | 324527 | SVPGN | 357036 | LDNVV | 379339 | HCLWR |
| 268704 | PTWPK | 324532 | GCPDQ | 357037 | LPVTQ | 379345 | GEVTT |
| 268711 | EIPKE | 324534 | YSENV | 357040 | SETSV | 379363 | LHAGE |
| 268717 | PSSYS | 324549 | SLASS | 357048 | PLQFR | 379368 | THLVE |
| 268719 | IYEFR | 324551 | GCTIV | 357051 | QCLIM | 379378 | LSAAT |
| 268720 | PGCTP | 324553 | KPTLV | 357054 | PPKKA | 379379 | PIGKP |
| 268766 | EPVPP | 324557 | GKSGD | 357057 | DDDDD | 379397 | PILMT |
| 268793 | TQWLC | 324558 | RSCAP | 357060 | RETYY | 379399 | KEKAT |
| 268794 | GGEDD | 324560 | TGICA | 357067 | SESKV | 379401 | SLREP |
| 268795 | LILWL | 324570 | SPARG | 357068 | RISNV | 379406 | HSASA |
| 268797 | QRNNL | 324573 | CKALA | 357069 | RIKYD | 379430 | WRKTY |
| 268802 | FVKKR | 324580 | RWPQG | 357072 | GSSPA | 379435 | LKHQL |
| 268835 | IGLDD | 324583 | AHRSR | 357076 | PRQIL | 379438 | TLTFQ |
| 268854 | LEDKS | 324587 | TFAAH | 357079 | ATSVN | 379441 | TDWEN |
| 268864 | RCAIM | 324595 | PEGIV | 357080 | NGLLV | 379450 | FIFVK |
| 268876 | IKPVS | 324598 | THNVI | 357086 | EEVLC | 379458 | MRPYK |
| 268896 | YLKKT | 324605 | EKETS | 357087 | YQRTK | 379464 | TAGRL |
| 268919 | KSKVE | 324617 | VEKWR | 357097 | NPKNN | 379500 | QQLKL |
| 268933 | TNPFL | 324628 | SGGLC | 357103 | LGSKS | 379503 | YQNQE |
| 268957 | PVMAN | 324633 | CRRKK | 357105 | ENNRK | 379504 | LSHSL |
| 268981 | VMNET | 324636 | LPMVP | 357106 | KEYFI | 379507 | ATGCK |
| 268989 | LIENK | 324648 | RFLPR | 357111 | SSQLV | 379520 | ETTPR |
| 269025 | KRSKK | 324651 | QVSEI | 357123 | PMNVN | 379528 | SPGSQ |
| 269033 | FYNTM | 324687 | AHRSR | 357125 | SKLLV | 379537 | KFYGK |
| 269051 | LPPPP | 324693 | TLTEI | 357126 | GWAGK | 379553 | FCKGT |
| 269053 | DGCDF | 324694 | KPQKE | 357128 | NKPGG | 379566 | PQMSS |
| 269064 | KSPSL | 324701 | SLDKL | 357130 | SYFGN | 379568 | RRKLN |
| 269080 | PQEEP | 324709 | WSGSC | 357132 | VALKK | 379571 | SRLEQ |
| 269081 | PQEDP | 324729 | HGKNF | 357133 | SCPAN | 379583 | DTFWD |
| 269097 | PIHSS | 324735 | QILDG | 357134 | LKLYN | 379584 | PAAGI |
| 269122 | FGYSM | 324740 | PGENL | 357135 | CLNSK | 379590 | LKTHS |
| 269138 | GNYQQ | 324741 | VEPVK | 357149 | LNQLW | 379599 | VYFST |
| 269141 | GGGDD | 324763 | NRFQD | 357150 | YQNIP | 379605 | GTLAG |
| 269142 | LALLK | 324767 | LPLDI | 357151 | IINIC | 379612 | VLNFD |
| 269143 | EKVAN | 324769 | ALAGK | 357153 | YQGVL | 379614 | TLAIH |
| 269159 | RDDEK | 324774 | STEGT | 357155 | MQTHV | 379616 | TKASE |
| 269187 | FRINF | 324775 | KKGEK | 357156 | VICSG | 379627 | IYEKV |
| 269190 | VSLQG | 324788 | HGEAA | 357158 | YEDAM | 379629 | LGTLK |
| 269195 | LPEIF | 324792 | IEVWG | 357169 | CLCNT | 379638 | IYVDI |
| 269197 | KEQLK | 324799 | PTSAS | 357175 | AAADA | 379646 | SSSSC |
| 269200 | RIAYL | 324803 | GKSGE | 357177 | ASPGP | 379651 | DAAGR |
| 269201 | PLISR | 324804 | VLSLA | 357178 | GGPGH | 379654 | PITKL |
| 269202 | NQHAF | 324806 | ASNST | 357189 | DHESL | 379669 | GYPKK |
| 269214 | GQNST | 324810 | PPSVS | 357196 | YLESS | 379678 | PTVIT |
| 269216 | ALALA | 324820 | QTKEH | 357199 | ETEDS | 379680 | EMSQQ |
| 269218 | SIPLA | 324827 | STWNR | 357204 | VYVRE | 379684 | GKAFN |
| 269221 | RPTTF | 324831 | RNQLF | 357206 | SSGED | 379688 | FILIS |
| 269228 | RLLNF | 324842 | ELQGF | 357212 | QKKRD | 379689 | EKLHV |
| 269280 | LPLSS | 324856 | ACKQQ | 357218 | VYRLQ | 379693 | NLVSL |
| 269289 | ARRRK | 324857 | NKYTY | 357220 | ICTIV | 379694 | DSDSD |
| 269290 | PGCPR | 324870 | HPGKC | 357225 | GLDSL | 379699 | ACYSL |
| 269299 | EPPLL | 324876 | GNTWN | 357229 | GAWRA | 379701 | KQKQL |
| 269300 | SGALP | 324878 | KLFIT | 357231 | EKHQK | 379704 | CPTAE |
| 269305 | GPDSD | 324882 | QRPPH | 357234 | PQFSK | 379707 | SHILT |
| 269321 | KDWKD | 324884 | KLTHL | 357244 | DAGQE | 379712 | DEWRE |
| 269346 | NQFPA | 324890 | AAYRS | 357251 | LFFVL | 379713 | FGRRD |
| 269347 | SCKIS | 324892 | DMFWS | 357259 | QEGGV | 379732 | KGRRG |
| 269349 | VADLI | 324895 | CCKKP | 357276 | GKFNK | 379733 | IRRMN |
| 269373 | RNLVK | 324897 | KFAPS | 357283 | NCSIM | 379738 | PVTQL |
| 269383 | EEVLS | 324901 | KIPSS | 357285 | VRKEK | 379744 | QRTRG |
| 269384 | IFHSE | 324913 | TDDKR | 357292 | GSQLS | 379746 | TAQNT |
| 269385 | FKEKR | 324920 | QFTFF | 357295 | KTKKN | 379747 | TSGWG |
| 269389 | YAADP | 324944 | KRKTD | 357297 | TVTEV | 379748 | YYPQQ |
| 269391 | GPLAV | 324948 | AVSAN | 357298 | VASES | 379751 | PLQML |
| 269392 | TPSTK | 324956 | DEVED | 357300 | RRRYL | 379754 | SSIIF |
| 269394 | RARVS | 324958 | ENIKL | 357301 | RGTPG | 379757 | TRKKQ |
| 269397 | EYVTV | 324960 | MLSRH | 357304 | FWMAP | 379760 | VPQST |
| 269439 | LGADS | 324967 | RGSGG | 357305 | KDSVT | 379769 | KELQQ |
| 269445 | TMDSD | 324984 | NAHLH | 357307 | SLSEY | 379770 | GVPGK |
| 269466 | IPIKK | 325002 | LASVG | 357308 | KKSRG | 379785 | LNGDT |
| 269468 | GARKQ | 325012 | NIYHV | 357315 | EELDE | 379787 | QWGTK |
| 269485 | GGAKA | 325016 | GLYPS | 357324 | ISGFL | 379791 | ALTED |
| 269499 | LDSAD | 325017 | RRHRS | 357329 | SFPAG | 379793 | PAGEE |
| 269500 | FGTEY | 325018 | RIHTH | 357330 | NSFRK | 379799 | LASNS |
| 269503 | LVFPL | 325027 | TPIRI | 357336 | TSLVL | 379813 | CTTFI |
| 269518 | RLHCN | 325032 | GIIDS | 357341 | VWAFD | 379824 | RNGLE |
| 269534 | EMQGP | 325038 | EKPYK | 357342 | LSANM | 379832 | QQSKP |
| 269554 | SNILT | 325040 | VSLLM | 357345 | RDISR | 379836 | GTYIM |
| 269571 | LDVPV | 325041 | AARPH | 357348 | EVGAF | 379847 | PGLDD |
| 269576 | KGPRY | 325065 | WLYHS | 357354 | RETGL | 379852 | RTHAD |
| 269577 | EDDLF | 325078 | CLFLC | 357356 | QGLQA | 379855 | AQQRR |
| 269582 | QKVGL | 325091 | KNEDL | 357360 | EDEEE | 379865 | SMKLY |
| 269586 | LVAAL | 325120 | LFHKK | 357362 | LQGRV | 379877 | FGLPQ |
| 269593 | DSFRE | 325123 | KEKLY | 357384 | RGLRF | 379889 | KHSMS |
| 269601 | TKYRY | 325128 | ATNRR | 357387 | EELQC | 379895 | QSYLD |
| 269701 | AVPTE | 325136 | EAYPK | 357389 | WLLQT | 379903 | ASLST |
| 269703 | LPPRA | 325137 | LKHRI | 357392 | LLQTP | 379925 | GGGCC |
| 269720 | EERKP | 325140 | RFSSP | 357393 | TFLAS | 379927 | SDDEF |
| 269724 | DGFLG | 325144 | TQTRP | 357394 | LLRIL | 379932 | KITVW |
| 269740 | VFLKW | 325146 | YPGSG | 357402 | MYMSK | 379938 | EFSRK |
| 269829 | TGEKP | 325155 | HFMCV | 357409 | HPPPK | 379942 | ALAQG |
| 269834 | RIHSR | 325156 | RPRPH | 357412 | KELLD | 379948 | PSFSS |
| 269844 | QMYSY | 325161 | LAQRP | 357425 | IKHNY | 379960 | RWKSR |
| 269856 | FIELH | 325166 | ESRSG | 357431 | QNEEK | 379965 | KKKKK |
| 269878 | FHIRI | 325184 | FLKSW | 357432 | VERKL | 379967 | IANKK |
| 269881 | RRNEL | 325203 | TSQRK | 357440 | PLLDS | 379974 | VAQMG |
| 269886 | VPLPQ | 325209 | KVFHP | 357442 | AANDG | 379992 | VCPSC |
| 269919 | YCHKH | 325219 | WGGCH | 357451 | EIREE | 379994 | VCPSC |
| 269945 | ISLLS | 325239 | AKDQE | 357452 | IRSRL | 380009 | LYCPG |
| 269967 | ELDGD | 325240 | YVEAI | 357461 | APSSK | 380019 | HLASS |
| 269973 | HRKTR | 325255 | EHSYP | 357470 | YFFPR | 380024 | ERKKK |
| 269981 | FLNDT | 325285 | ATASS | 357475 | KPLKG | 380025 | LRSKS |
| 270001 | IHNGI | 325290 | HSLFK | 357477 | NCITQ | 380041 | AASEE |
| 270014 | FLNDT | 325296 | TLQRS | 357480 | QRLGK | 380053 | GISDA |
| 270059 | LLNPI | 325301 | PGSRT | 357484 | HKKSY | 380055 | LGSRL |
| 270061 | MTMSV | 325312 | RGDDY | 357494 | GDGSD | 380082 | FELEA |
| 270077 | TESQS | 325313 | CKVEF | 357501 | DEAKL | 380085 | SNHQP |
| 270112 | VKTQC | 325326 | TLADD | 357507 | LESTL | 380090 | KPSMY |
| 270115 | SPVPT | 325343 | SALKI | 357511 | YVERF | 380092 | GSSNP |
| 270139 | QQDFV | 325355 | DAMLD | 357513 | DMTSI | 380094 | WTRLL |
| 270142 | IGIAQ | 325369 | LPSFK | 357515 | GMFQL | 380108 | SCLSL |
| 270162 | FVLVQ | 325370 | VVTPC | 357525 | AAGGT | 380116 | EARRL |
| 270172 | LTSSL | 325376 | IDRNA | 357534 | DCLAA | 380117 | GLSNS |
| 270176 | ARKLD | 325377 | GGRGR | 357535 | NFKDQ | 380120 | DVENL |
| 270190 | EHPEC | 325381 | SLSPG | 357542 | IYHPQ | 380133 | KRDYV |
| 270202 | ASGTA | 325386 | SLLNF | 357545 | QAKAK | 380139 | KFWKR |
| 270221 | LRKRE | 325393 | LTECV | 357547 | WSIRH | 380143 | ACHIQ |
| 270223 | SGTVV | 325398 | TKDVL | 357554 | SAAQP | 380147 | KRGKQ |
| 270225 | CLGPK | 325402 | RWKSP | 357555 | RRKQH | 380148 | IYFFT |
| 270233 | FGDEC | 325414 | IILGS | 357556 | TGDAF | 380153 | AVGGK |
| 270235 | PRPEH | 325421 | GGGSK | 357561 | KATFQ | 380155 | HASEP |
| 270238 | GPVEN | 325423 | AETHT | 357564 | KCSLG | 380174 | QSAPK |
| 270257 | YTFKP | 325425 | QTVFH | 357565 | AEKIP | 380178 | ETAFE |
| 270279 | DPAPA | 325431 | RVRRG | 357567 | DGWFA | 380181 | HCTRP |
| 270281 | HWESW | 325438 | DVSSL | 357574 | HHSCF | 380182 | FFAFF |
| 270288 | HVTEL | 325448 | VGTSV | 357575 | KVKKL | 380223 | VCRCL |
| 270301 | KARGH | 325452 | GALAG | 357579 | SDSAD | 380229 | ASLKK |
| 270328 | TCHGH | 325458 | NQSEA | 357581 | AGDAL | 380243 | YKASD |
| 270349 | HWLKV | 325485 | YWAEE | 357583 | CCVVQ | 380248 | SSLVL |
| 270357 | VNVSA | 325506 | LLALD | 357585 | IELKP | 380251 | RKSHL |
| 270443 | KVFSR | 325508 | EILVI | 357588 | TAHNM | 380253 | DVKKN |
| 270451 | RWKHP | 325511 | NTSLL | 357591 | YRGKK | 380254 | HCAWP |
| 270457 | EKPYK | 325519 | CSMGG | 357594 | STPEL | 380262 | EDILF |
| 270458 | KTTPV | 325525 | LEGVF | 357597 | GFQSG | 380268 | NTFWI |
| 270459 | GGEGR | 325526 | RYVCK | 357598 | TQFET | 380273 | LNAEV |
| 270460 | NPFLL | 325527 | QVLLH | 357600 | RFQSG | 380278 | EPRRP |
| 270474 | GGDPT | 325546 | HQAFQ | 357615 | NNFIR | 380282 | AGHCT |
| 270502 | AEAPR | 325548 | SQLKD | 357624 | AEAAE | 380285 | PYKCK |
| 270509 | QLQLL | 325555 | IKKSE | 357625 | STSTF | 380290 | SQTFL |
| 270517 | QQGQS | 325561 | SGAEL | 357632 | LRKMR | 380293 | LTVHK |
| 270530 | QGLDN | 325562 | KEQEQ | 357643 | DSEDI | 380301 | KITLI |
| 270538 | TEQIL | 325564 | YCRCP | 357644 | ISGQK | 380304 | KNHTN |
| 270560 | QDTPH | 325589 | HVTAL | 357645 | EMHPK | 380308 | TRIPA |
| 270583 | SGAED | 325608 | QPLRW | 357651 | LSIAM | 380310 | TGENP |
| 270586 | TLPPA | 325612 | PEDRP | 357656 | PGENL | 380312 | TKHNS |
| 270590 | NAPRE | 325618 | RSPDT | 357657 | GEMGS | 380325 | ETIQM |
| 270593 | LGGPV | 325628 | RNRYH | 357660 | DGILF | 380328 | ITLQM |
| 270617 | QQYCL | 325634 | VHETT | 357662 | APPPG | 380329 | KWPEE |
| 270625 | QFQKF | 325638 | KRTPS | 357668 | TAYIK | 380331 | KICIP |
| 270631 | VLDAP | 325660 | VYLEF | 357669 | SSTRG | 380335 | MNEMK |
| 270632 | AVRRA | 325663 | RAPPY | 357674 | GSPGK | 380341 | GVTVR |
| 270634 | HGLLV | 325668 | ETEDV | 357681 | KSCVC | 380344 | FRRRR |
| 270637 | AVPTF | 325674 | LLLAE | 357687 | FWENS | 380351 | SNLTT |
| 270642 | LWWRM | 325675 | LVMDK | 357692 | QQSSS | 380352 | DQPLQ |
| 270645 | HHDEL | 325677 | RIYIS | 357696 | CPDRP | 380364 | CVAAL |
| 270685 | KETSF | 325681 | IFFLD | 357701 | PPCSQ | 380368 | GQAGL |
| 270691 | KLEEE | 325682 | WRLCG | 357708 | EALKG | 380369 | PSFFF |
| 270708 | LGGHT | 325683 | AFICV | 357711 | SGGSQ | 380370 | ATAAH |
| 270720 | SREFS | 325690 | MHYGS | 357713 | SGGSQ | 380371 | RRSLA |
| 270722 | PINHL | 325691 | SIYEV | 357715 | SKGYG | 380374 | ATMPG |
| 270747 | GEAPV | 325708 | LARYR | 357721 | ESHKE | 380376 | SYKFN |
| 270776 | SSYNA | 325713 | SEALP | 357726 | HTHKE | 380380 | LSGFD |
| 270800 | VQWES | 325727 | HCTLA | 357731 | TWPSK | 380383 | HNNNC |
| 270815 | PQDQA | 325738 | TRSSG | 357732 | PGKGK | 380388 | VIVTP |
| 270824 | RMHYY | 325747 | VAAVP | 357736 | CPPPE | 380389 | IPALW |
| 270861 | TPNFH | 325748 | LTSTR | 357739 | PPKSK | 380395 | YEKAQ |
| 270879 | RMMLR | 325775 | GPRDA | 357748 | GIALS | 380398 | AESAE |
| 271015 | TVSRQ | 325776 | SNLSS | 357753 | PPKHK | 380402 | NFCIF |
| 271064 | DMGHH | 325785 | KYFET | 357754 | SRPSK | 380403 | VSHCA |
| 271069 | KGPFG | 325794 | NIPCK | 357757 | SGGCC | 380413 | SPSLL |
| 271139 | ERICH | 325808 | AAGAL | 357759 | SGGCC | 380414 | KELIS |
| 271227 | QAIVR | 325817 | LATTC | 357762 | KSAYF | 380417 | PRVMG |
| 271263 | KLHLC | 325819 | SIQCS | 357768 | SGDCC | 380442 | ERAGA |
| 271277 | LPTSS | 325822 | FRAIN | 357769 | SGGCC | 380450 | PTTEQ |
| 271308 | VIKDI | 325827 | HLVLN | 357772 | SGGCC | 380451 | KKHDV |
| 271324 | QTIGL | 325836 | KCTLM | 357773 | SGGCC | 380452 | YFLMV |
| 271331 | KNINF | 325850 | GFQCG | 357775 | PHGCC | 380455 | CPGWS |
| 271332 | FNFLH | 325863 | RRNRR | 357776 | SGGCC | 380465 | RGVLA |
| 271348 | DDLSV | 325864 | LETIN | 357778 | SGGCC | 380476 | GGRWK |
| 271357 | AAEQR | 325868 | LVDVE | 357779 | CCSGC | 380480 | SLIIH |
| 271373 | AKAHK | 325875 | MEEVD | 357783 | HINST | 380485 | KSEER |
| 271375 | AVCLA | 325905 | PERMD | 357789 | YYYYE | 380492 | GTFNI |
| 271385 | KRRED | 325915 | VILHG | 357791 | CYFYQ | 380493 | FFGFF |
| 271417 | MSLVV | 325917 | EEQIC | 357794 | SQYRP | 380501 | PPHPA |
| 271450 | VNSNN | 325919 | PPALF | 357796 | STTKQ | 380504 | GQKHV |
| 271452 | FKMST | 325921 | DSLVD | 357798 | STLNM | 380506 | SNSSC |
| 271469 | VKNGI | 325929 | PGSLV | 357799 | QKGKK | 380507 | CCKWI |
| 271526 | AKYGF | 325937 | PSLTR | 357804 | AKSLT | 380514 | KMPRD |
| 271532 | KDEES | 325941 | DSDPD | 357807 | EESPQ | 380523 | TAWKL |
| 271555 | TWTLK | 325954 | PHPGK | 357810 | TAKLF | 380537 | LVAED |
| 271583 | RGICL | 325958 | VISKT | 357811 | SSLES | 380542 | KSKRS |
| 271588 | SAYPY | 325978 | HGGFQ | 357812 | DDYLL | 380547 | NGDTT |
| 271610 | LNQGS | 326003 | PALDD | 357820 | PSEPP | 380548 | PKASG |
| 271620 | SLSKK | 326010 | SLKRK | 357823 | TSPQI | 380559 | SDLSQ |
| 271628 | GPLPQ | 326018 | QAAAV | 357824 | DKKAA | 380572 | QSAGI |
| 271636 | QTSSC | 326021 | TFTPH | 357830 | PSLAF | 380579 | GPEGP |
| 271638 | SQKRT | 326022 | MDTDI | 357834 | RDVAT | 380580 | HTHRI |
| 271643 | PQDPS | 326030 | YKIHL | 357835 | QHADK | 380581 | ARGTQ |
| 271651 | SFPKM | 326031 | AKAKK | 357838 | TILSF | 380601 | HCTRP |
| 271657 | TNGIM | 326042 | EGEEY | 357840 | KGTNV | 380602 | ARSSL |
| 271699 | SSTIK | 326044 | PGANI | 357842 | RVVET | 380603 | ALERS |
| 271715 | DLMEI | 326047 | TLWLS | 357844 | SDSII | 380604 | RPVPS |
| 271751 | IFGAS | 326050 | FGSSF | 357850 | YVNRD | 380612 | VFIYP |
| 271764 | PGKKK | 326052 | TSGIM | 357857 | RIKKN | 380621 | TGRKP |
| 271776 | YQIRI | 326063 | ELKAN | 357858 | KSPCT | 380622 | SPCLF |
| 271816 | QLSRH | 326070 | AKTSI | 357861 | SDIWI | 380627 | TLSSG |
| 271835 | RSTKP | 326085 | NGAQP | 357863 | TQMLP | 380631 | VSTHS |
| 271843 | QIESI | 326095 | SLSEN | 357873 | IDAEY | 380632 | RTQPE |
| 271857 | GNLRI | 326101 | EESKA | 357875 | VSELL | 380635 | HRAND |
| 271889 | HADEM | 326109 | VASVM | 357876 | EEDKK | 380636 | TCVMN |
| 271915 | SSSSC | 326110 | ARNNT | 357880 | QQQQS | 380641 | VSYYS |
| 271971 | LTMNI | 326150 | VGQQP | 357882 | PLSTG | 380645 | ALGSL |
| 272065 | LEKAH | 326159 | TVQAS | 357883 | SEFTH | 380648 | AAFTR |
| 272091 | KGKKK | 326170 | HVFRS | 357886 | SNGER | 380651 | GTSSH |
| 272102 | LRNQK | 326194 | SCVIL | 357887 | KIVIK | 380660 | TRIHP |
| 272117 | DAPLA | 326200 | ISGGE | 357889 | INEGL | 380671 | PSVKN |
| 272133 | TLVSS | 326215 | SLLSS | 357890 | EATSD | 380674 | EQCRW |
| 272134 | RRLQP | 326219 | TPSRL | 357891 | IPNSE | 380675 | REPLH |
| 272139 | RGSEA | 326225 | ALSRE | 357892 | INEGL | 380677 | LFMSV |
| 272163 | FPYIY | 326227 | EVRII | 357900 | KLQNY | 380679 | SPGPS |
| 272164 | YTCKG | 326232 | GKTSI | 357901 | DLPLD | 380682 | GTPSA |
| 272167 | VLERQ | 326238 | CNWII | 357904 | EIFKL | 380684 | LKIQK |
| 272190 | FALAR | 326240 | LQQLY | 357905 | EEEPR | 380689 | IVSSA |
| 272193 | FSGSM | 326241 | PASHQ | 357906 | DEGKL | 380690 | FFRKI |
| 272217 | KSRRS | 326244 | GQGAL | 357907 | QAHRY | 380692 | ARFFV |
| 272223 | SKIKC | 326247 | DIEVI | 357909 | GRFNF | 380701 | RRQGE |
| 272224 | ACGCR | 326249 | HIGEK | 357914 | ATVSS | 380702 | EKRAE |
| 272233 | CCKVL | 326253 | SGSGP | 357915 | SGLGE | 380706 | WARPL |
| 272238 | LSLLD | 326259 | SKGTG | 357917 | ELDLL | 380707 | TVVLM |
| 272249 | TSSHL | 326267 | GQKEA | 357920 | PKSNL | 380711 | AETSN |
| 272252 | KFSVA | 326272 | VLHFQ | 357927 | GSGGT | 380714 | LVEGI |
| 272286 | PSQDW | 326281 | LTMYA | 357943 | RAEDM | 380718 | KIDEF |
| 272298 | MMTAK | 326294 | PCIIL | 357945 | HRKND | 380719 | SHYAA |
| 272317 | KPEDK | 326296 | DIHAQ | 357955 | GDPYA | 380727 | KDLQA |
| 272321 | HFGLV | 326301 | LSGKL | 357961 | FRADW | 380728 | SVDLI |
| 272322 | WEQKR | 326305 | ATPNL | 357962 | IKTHQ | 380733 | FVSNR |
| 272324 | CKFKD | 326309 | KHEYE | 357963 | IMQEY | 380734 | GYRRY |
| 272342 | PTSFL | 326333 | RPRPP | 357965 | RGRLL | 380753 | PCLCC |
| 272348 | ALERV | 326340 | VVLWQ | 357969 | TAVPL | 380757 | CQLDL |
| 272367 | WILSN | 326342 | LTLKV | 357973 | DRTKK | 380762 | RGGSQ |
| 272369 | QWHYM | 326348 | PSEDL | 357979 | KSSDI | 380763 | ITKGD |
| 272371 | KILGA | 326349 | GVNIL | 357980 | EEIDP | 380764 | IEEPK |
| 272386 | HTIVD | 326366 | HQFYI | 357981 | SYPEI | 380766 | LPSKG |
| 272390 | YTGHR | 326371 | DCTKY | 357986 | PVSDV | 380767 | RNIEV |
| 272395 | YTGHR | 326379 | STERI | 357990 | IFPAS | 380774 | FFPFV |
| 272402 | RPEGL | 326381 | VADLI | 357998 | EEDDD | 380781 | QSWFL |
| 272418 | KRAAT | 326391 | FREGT | 357999 | AFNKS | 380785 | PTDKH |
| 272425 | KVGSL | 326394 | AMVPS | 358012 | FVIFL | 380788 | GPLCQ |
| 272430 | LQSPV | 326404 | QGCTC | 358018 | KQAKF | 380790 | LGLQA |
| 272433 | YNKGL | 326407 | LGEGD | 358019 | QKPSA | 380793 | SKKAH |
| 272438 | RQKIY | 326411 | FTLDD | 358022 | AYLIR | 380803 | ETGML |
| 272440 | PCVLQ | 326417 | MKRHF | 358031 | RTGDL | 380804 | SSGCC |
| 272444 | WEWTQ | 326420 | AQEIG | 358033 | VTRFS | 380807 | TSPFP |
| 272452 | FHFQF | 326424 | LDGVD | 358042 | VSLKQ | 380825 | AASLD |
| 272462 | SIYYH | 326432 | VDYIL | 358045 | EPKEE | 380827 | LSVQV |
| 272520 | LLYPD | 326437 | IEHQG | 358059 | VINVV | 380828 | LKGFQ |
| 272521 | NPGRS | 326445 | DFSSS | 358060 | AEEIF | 380830 | KPRLY |
| 272542 | VILRM | 326473 | QTYNN | 358062 | MVLYT | 380831 | WHFGQ |
| 272546 | NVANG | 326475 | SEAAP | 358064 | FPPRY | 380835 | GTFNF |
| 272567 | VTNGS | 326477 | RKKIL | 358067 | CTSGH | 380845 | AGKLG |
| 272570 | KKSCK | 326491 | EDRNS | 358071 | EQPQH | 380852 | SLDGT |
| 272598 | YTGHR | 326495 | GYGWW | 358080 | FPNPK | 380855 | VNSAI |
| 272607 | SPHLA | 326500 | GAPNL | 358081 | NPAAP | 380857 | QKKTC |
| 272610 | INKVV | 326514 | IAQSH | 358089 | SYQTQ | 380858 | LKLQF |
| 272638 | STQQM | 326519 | RQRKY | 358095 | GMYFM | 380861 | KGKEP |
| 272641 | YLSSG | 326528 | DPING | 358099 | RIYNT | 380862 | DLLTS |
| 272643 | GDLDM | 326531 | FSLSF | 358104 | STGSS | 380865 | KVLER |
| 272644 | AKSEL | 326538 | WGPGS | 358105 | IPPED | 380868 | LSSRA |
| 272645 | RSFQY | 326549 | KDKLA | 358106 | VDWIP | 380871 | RNGQM |
| 272647 | YNHYS | 326550 | KMEKI | 358107 | ATTEA | 380873 | KQEKI |
| 272732 | VKVSS | 326563 | KLARS | 358118 | LTMVA | 380875 | KVSQL |
| 272748 | SLTAE | 326567 | KLAQI | 358119 | TAQFK | 380876 | GDGVA |
| 272771 | STRLI | 326570 | LTGSG | 358126 | SASRR | 380878 | KKAHS |
| 272797 | CVYNV | 326572 | SVLQK | 358131 | LVHRF | 380888 | IMNML |
| 272839 | QKEDL | 326574 | FLKIF | 358133 | KETMA | 380895 | TETEC |
| 272845 | MPTLR | 326579 | WRWTS | 358136 | WITRC | 380898 | EIEEK |
| 272847 | TEDVL | 326581 | NTHTG | 358140 | TTVRR | 380916 | FLYRI |
| 272852 | CMSLL | 326598 | LLAAL | 358142 | GQVLQ | 380920 | FRACQ |
| 272893 | EKKAM | 326603 | SKEDF | 358146 | TLGTP | 380921 | ALQSK |
| 272895 | DQMES | 326624 | ASFFP | 358147 | SRGYR | 380929 | KTDKN |
| 272902 | LPTMD | 326630 | AEHVK | 358153 | YGFGG | 380930 | FLTLQ |
| 272907 | LANRD | 326633 | RKMFG | 358154 | RGERA | 380931 | PKVLG |
| 272928 | EQSTK | 326649 | RIPLL | 358155 | KAKGK | 380933 | CYDIC |
| 272930 | KRYAR | 326652 | IGNSI | 358158 | KAKGK | 380935 | SRQRI |
| 272937 | VWRPW | 326671 | LATRH | 358160 | RGERA | 380937 | VWHLG |
| 272972 | REEFQ | 326687 | SFCSP | 358162 | YGFGG | 380939 | GVQWR |
| 273037 | LRKTS | 326693 | RHLQS | 358164 | YTSSK | 380941 | LCVPS |
| 273038 | PSVVS | 326699 | RVRKD | 358165 | PQGAT | 380942 | HSDKS |
| 273047 | QCCSN | 326706 | RRSAP | 358169 | NMGYM | 380946 | LRLIG |
| 273048 | AVAEP | 326708 | SLSGS | 358171 | GGTVA | 380960 | RIHPV |
| 273062 | PRPGS | 326718 | KLDVF | 358174 | EECIR | 380972 | VLFMF |
| 273063 | LHMPV | 326733 | EVILE | 358175 | RGERA | 380977 | PDFCP |
| 273064 | PLPPQ | 326756 | WRWQC | 358177 | PQGAT | 380981 | GMMAW |
| 273067 | RVTTV | 326759 | YDLDT | 358182 | QHLEE | 380982 | EKLST |
| 273075 | NLLVD | 326763 | ISTVV | 358200 | KFSNS | 380988 | TVPFF |
| 273077 | MHKSK | 326777 | QQRDK | 358202 | VTSDD | 380990 | IFLYF |
| 273083 | SPRML | 326785 | LTDKS | 358203 | VIFPQ | 380994 | VWKFP |
| 273085 | SDSDD | 326804 | YSYLA | 358205 | PILGM | 380996 | PQIIK |
| 273130 | EGEAS | 326806 | LAQNQ | 358207 | KKALD | 380999 | ACEKT |
| 273142 | LWKAH | 326809 | VTAGW | 358221 | VIFPQ | 381004 | FWYIG |
| 273145 | GNKSA | 326813 | NFGEV | 358223 | TLTPC | 381008 | MESTS |
| 273146 | RDEDP | 326817 | KKKFA | 358224 | DCGQF | 381009 | KKSSC |
| 273153 | EPVPV | 326819 | KLSNL | 358225 | PQPPE | 381010 | AGACA |
| 273158 | MGLKS | 326830 | LKKSI | 358227 | PSQRA | 381018 | LVSAS |
| 273173 | SSDDV | 326841 | EAVNS | 358229 | VIFPQ | 381019 | PPGFK |
| 273179 | RLCNR | 326846 | RATEK | 358232 | NLKPC | 381022 | ASSRK |
| 273183 | VLENI | 326858 | TLISK | 358233 | KQMAP | 381026 | FGAHY |
| 273221 | SVLCS | 326863 | RKFNS | 358241 | VGNEE | 381029 | NDSNG |
| 273258 | SKVKE | 326867 | CYLTF | 358251 | ASSTP | 381038 | KIPEE |
| 273261 | LAPKS | 326869 | GINKY | 358262 | RQLVP | 381047 | QEHAE |
| 273283 | VPDIF | 326870 | GDILD | 358265 | RIGTI | 381052 | MDKGF |
| 273286 | DSSPA | 326873 | EGVHR | 358272 | AIRSK | 381053 | CRRKR |
| 273291 | VPNLF | 326879 | ESPPS | 358280 | FLRRP | 381059 | SQSVR |
| 273308 | SHDEL | 326884 | QRDIT | 358283 | SVTEE | 381061 | PLTRI |
| 273317 | HQHHF | 326888 | DLNSA | 358289 | PQPPE | 381064 | LQTLT |
| 273320 | AWSVS | 326921 | KPGDL | 358293 | RTKKT | 381065 | PAPGD |
| 273347 | CPLET | 326924 | KKEKK | 358297 | DRWTF | 381069 | RKGDH |
| 273352 | AKESI | 326929 | VVSLL | 358301 | SESKV | 381076 | KVLGL |
| 273353 | KVQEE | 326933 | VLVGS | 358305 | IISLD | 381079 | PAPGC |
| 273359 | STIVN | 326946 | LAAAS | 358307 | LRYVF | 381086 | REIFF |
| 273371 | KIACV | 326948 | MSCSP | 358309 | TGIQV | 381091 | DERLQ |
| 273375 | SLHYD | 326966 | DCLLT | 358310 | EKLEQ | 381097 | PTAMA |
| 273390 | NENNS | 326967 | HLKTH | 358312 | LRLKP | 381102 | VQNFS |
| 273395 | PPLTI | 326981 | FDLEA | 358314 | HSSNC | 381105 | QRAKS |
| 273398 | RSLED | 326997 | PAQEL | 358316 | CWIIK | 381107 | SGIVQ |
| 273406 | LAKIA | 327024 | PRRRR | 358320 | DEAIY | 381108 | PFLSS |
| 273411 | TKLGL | 327038 | RSLSL | 358323 | NNNVQ | 381109 | ALFGK |
| 273430 | CFEVE | 327048 | SVFTK | 358334 | SLDVG | 381113 | RCESE |
| 273432 | HPSHF | 327054 | GCYVM | 358335 | RQGTS | 381115 | DICYS |
| 273435 | LELGI | 327070 | VKTLK | 358358 | VKFNS | 381116 | RTRQA |
| 273450 | VTFEY | 327072 | VNPRL | 358363 | QLPIC | 381122 | TPDLR |
| 273480 | QRIGK | 327075 | TISRP | 358365 | KALLL | 381127 | LGLQV |
| 273482 | FYPRN | 327080 | RSWRR | 358370 | DCGQF | 381129 | EPKQC |
| 273512 | LDQNL | 327082 | KSKTH | 358372 | TDPRD | 381134 | PWLGC |
| 273550 | SDNES | 327092 | FIILP | 358379 | RGRRS | 381136 | PDKAS |
| 273588 | YYTLK | 327104 | NLDPI | 358385 | GSGRR | 381142 | LVSNS |
| 273590 | KTHRE | 327133 | YYGSR | 358387 | DCGQF | 381143 | LVSNS |
| 273598 | LLSYT | 327143 | ADLHV | 358388 | IIQLH | 381145 | PRYHY |
| 273600 | CALDY | 327144 | KSNKK | 358389 | DNPPA | 381147 | YFVDA |
| 273610 | RVGHC | 327145 | KVKVP | 358391 | PQGAT | 381150 | EPALH |
| 273612 | LSLNE | 327154 | NEIHQ | 358394 | RGERA | 381161 | QPLVV |
| 273628 | ARTDL | 327168 | RTTAV | 358397 | EECIR | 381162 | KTSEF |
| 273641 | TWKPL | 327179 | KKFGT | 358400 | ASDHP | 381163 | LLELK |
| 273654 | VMSMS | 327191 | MSSLK | 358401 | GSGRR | 381167 | FLKNQ |
| 273666 | KWYQF | 327197 | CRLMD | 358405 | KSAWA | 381169 | LQRYR |
| 273668 | SDSDD | 327213 | KKESE | 358407 | KKQKK | 381181 | APDAL |
| 273695 | SLCEK | 327214 | AGPLR | 358413 | EKKNR | 381182 | RLFEC |
| 273739 | TRCVS | 327234 | DMLPH | 358414 | ARRPV | 381183 | ERPDA |
| 273783 | SSEDD | 327246 | EVSLV | 358417 | FQFHF | 381184 | KEHLS |
| 273784 | RHFKV | 327251 | EMSAL | 358422 | TRTEQ | 381186 | PSTAQ |
| 273794 | SPANV | 327255 | TDDMW | 358423 | PRVLL | 381188 | TLEHH |
| 273814 | ESDPR | 327290 | PKVLE | 358424 | KSKTQ | 381190 | ANGQA |
| 273853 | TQIKR | 327309 | RYGSY | 358428 | QFSRL | 381194 | GEAVA |
| 273854 | GMVPL | 327323 | LNTSQ | 358430 | ICAVL | 381198 | FQRKK |
| 273857 | TFLLN | 327336 | GNYKK | 358437 | SVHMV | 381203 | KRQSL |
| 273859 | KGKES | 327341 | SSAHA | 358451 | PSPDL | 381204 | HDAII |
| 273861 | AQTSL | 327344 | VQYQS | 358452 | APGED | 381209 | NENSQ |
| 273905 | ITSCE | 327348 | RPQNT | 358454 | SGQGV | 381210 | GVNLL |
| 273920 | LPSST | 327349 | FSSPR | 358456 | SGQGV | 381211 | EGSEV |
| 273936 | DEFMI | 327376 | KILLF | 358458 | WLPCN | 381215 | ERRRL |
| 273951 | LKNIL | 327378 | PSACL | 358460 | AKQKS | 381216 | QQQAQ |
| 273962 | NSLPH | 327379 | QRGLG | 358463 | WSIFS | 381218 | VALAN |
| 273963 | VVDCM | 327386 | PGEAA | 358464 | YRAMV | 381220 | SEPHS |
| 273968 | EVEQR | 327408 | EQLNK | 358466 | RRCLC | 381227 | KQQGQ |
| 273980 | PSPQI | 327415 | LYLML | 358478 | VLFGI | 381228 | ITFRK |
| 273986 | KKKEV | 327416 | RTYSC | 358479 | HKNSW | 381234 | ERDQK |
| 274000 | DQQTR | 327417 | QEHEV | 358485 | SMEMD | 381236 | IESLQ |
| 274008 | GLHTL | 327428 | GQRQL | 358486 | PSRHL | 381237 | EKKEK |
| 274024 | IFKKD | 327436 | AGVKE | 358490 | SPSSN | 381238 | DQGVH |
| 274026 | ETLNL | 327440 | ACGCH | 358491 | KSASK | 381239 | SLPSS |
| 274028 | GFPPR | 327442 | SDLSL | 358494 | TSITV | 381244 | CHPGH |
| 274030 | NNSLS | 327443 | GTHRG | 358497 | PRPLT | 381247 | GERKR |
| 274031 | ATQQK | 327453 | KARAQ | 358503 | VWCQR | 381254 | DKAGL |
| 274054 | FGPYY | 327459 | QNQGN | 358511 | SAEAL | 381255 | FCSLK |
| 274056 | EVVSV | 327467 | DDDDD | 358512 | QIGPP | 381263 | IRRNL |
| 274063 | RKLQC | 327468 | LRDGV | 358515 | TQMIK | 381271 | LELGL |
| 274068 | SLGLE | 327481 | FPAAV | 358518 | SGQGV | 381272 | VRKVL |
| 274071 | GSTGG | 327482 | TQELW | 358525 | AVRRA | 381274 | GWSAV |
| 274093 | HQQQD | 327486 | RAKIS | 358529 | SRDVI | 381277 | EDVEC |
| 274134 | EDVGH | 327487 | QDVGH | 358531 | EKLFV | 381282 | SSGGU |
| 274137 | RQHHH | 327489 | AGMIS | 358532 | PGTWK | 381292 | SVYMI |
| 274140 | QSSQE | 327506 | TSVGF | 358533 | LVFSE | 381293 | PLDFD |
| 274170 | SERTT | 327509 | ALTEI | 358534 | VPQHA | 381294 | SPGWP |
| 274181 | SKSNL | 327513 | VELPV | 358541 | SQAIK | 381295 | YGNGR |
| 274192 | IPFLF | 327522 | FIKIK | 358542 | VDPVH | 381297 | VYLDS |
| 274203 | QGSSR | 327525 | YSKIF | 358546 | AGVID | 381298 | RDQSK |
| 274217 | HIPVF | 327533 | KRQSF | 358547 | VSWVY | 381302 | TEGPV |
| 274258 | WALDL | 327536 | FTGEL | 358548 | PCVVM | 381304 | TRNKL |
| 274276 | GEHYC | 327538 | TREKP | 358549 | PVCRM | 381305 | GEKKT |
| 274278 | KVKKT | 327539 | GGWGM | 358551 | LKSTE | 381307 | CWVMW |
| 274289 | LQRCN | 327540 | HRFSS | 358552 | FLQKK | 381316 | SQGAV |
| 274306 | IKGAV | 327541 | ELIAL | 358554 | IRQDF | 381318 | FELQT |
| 274311 | SSEED | 327542 | AYFLP | 358558 | GNPRL | 381319 | LRRRR |
| 274341 | FRAYN | 327557 | RRMYL | 358563 | ELVSE | 381320 | LEVIP |
| 274345 | LICLL | 327563 | LGNNS | 358565 | RVIGV | 381321 | SAVIW |
| 274353 | KFKSQ | 327564 | FQRPK | 358571 | QYSYL | 381322 | RCPLP |
| 274361 | NTNVP | 327569 | LKEKA | 358575 | DVDET | 381323 | RKPLS |
| 274368 | CLSGL | 327570 | RQSVV | 358576 | YHKPC | 381324 | AEKAP |
| 274376 | TNDVR | 327582 | GQQLP | 358583 | ASLQG | 381325 | RPFVF |
| 274382 | LCGYH | 327583 | AEEKQ | 358588 | RQSKV | 381329 | HPSIQ |
| 274400 | APSGV | 327585 | FKRLT | 358593 | ENLES | 381331 | QLSNP |
| 274432 | MNEQI | 327588 | TTWVS | 358595 | YYHKS | 381336 | FTTLH |
| 274456 | DEENI | 327589 | GVTFT | 358596 | TATSC | 381337 | KDQRQ |
| 274457 | VSLHR | 327594 | MKKRH | 358599 | EKKDN | 381338 | LRPFF |
| 274458 | LDSLT | 327597 | TLQME | 358605 | HLMPQ | 381339 | DCGLF |
| 274459 | SQAWG | 327599 | KRHNC | 358607 | SLEQR | 381340 | EAAGY |
| 274473 | SSSSE | 327604 | CCIHF | 358618 | GKSLG | 381347 | LFVLE |
| 274487 | LQQKS | 327608 | RRCPG | 358622 | MECIE | 381348 | TQSFL |
| 274498 | YVEFL | 327611 | TSASR | 358635 | GQQWK | 381350 | NRDPG |
| 274507 | PTAYL | 327620 | TNGVR | 358640 | EESPV | 381351 | GDLSL |
| 274513 | FPMQL | 327627 | TFWEI | 358644 | QERLD | 381356 | GQAGL |
| 274516 | KKHQS | 327634 | LISES | 358650 | TTPAS | 381358 | KKSYS |
| 274520 | MRGKI | 327637 | MVKIT | 358655 | RSTAS | 381360 | PCVSS |
| 274532 | GLFTL | 327647 | LHMLE | 358667 | QRHRR | 381366 | VTVTG |
| 274542 | PVESA | 327650 | SEVKA | 358670 | CPASP | 381373 | LPPAL |
| 274545 | SSSVE | 327652 | GQHPT | 358677 | SAHMV | 381377 | HLQLR |
| 274547 | LYYVN | 327669 | RPKPQ | 358694 | ISKQH | 381381 | LQFVP |
| 274565 | HDGSC | 327675 | LKQIE | 358695 | HSFTA | 381382 | HMGQM |
| 274569 | VKTEL | 327680 | QRDAR | 358696 | VSSDS | 381388 | VFNVK |
| 274576 | DVHNQ | 327681 | EDRGA | 358698 | WLDQT | 381391 | LATKL |
| 274599 | TVVKS | 327687 | KETVA | 358702 | FRKTT | 381393 | SDPPA |
| 274605 | ESSKI | 327689 | QPAKL | 358703 | LTCEN | 381394 | LGRDG |
| 274606 | LPLPL | 327691 | TGDAK | 358714 | NCAYG | 381397 | KQRQF |
| 274615 | LCMCA | 327694 | LSAQF | 358715 | NCTSV | 381406 | PSFFF |
| 274625 | PTHPA | 327696 | SGFYY | 358716 | MHSNQ | 381407 | PLNIH |
| 274629 | LAAQK | 327703 | LLVCQ | 358718 | TKMTF | 381410 | PGLHL |
| 274643 | DFVTK | 327704 | DDMYL | 358719 | TKVDQ | 381412 | SVLPH |
| 274670 | SKMTS | 327715 | ARISM | 358727 | CDYGL | 381414 | TPDLR |
| 274673 | PIEQK | 327716 | LHPFS | 358730 | PTEQM | 381418 | ISACT |
| 274680 | VEGRF | 327718 | FVPSL | 358737 | AQPVM | 381419 | LTVSE |
| 274695 | VKVYN | 327724 | RCGTP | 358743 | VDEEA | 381421 | PGKGV |
| 274705 | KAPPF | 327732 | AQSPL | 358753 | SLYYN | 381422 | AGRWL |
| 274710 | TGPDT | 327738 | LNSHV | 358756 | GEAEQ | 381423 | QDSVS |
| 274711 | KECEV | 327756 | PALGA | 358758 | SCCSW | 381427 | FFVET |
| 274712 | TKKSY | 327758 | GIRAW | 358763 | SLGSL | 381428 | NSQDC |
| 274721 | LLSLW | 327761 | FINCF | 358765 | SNSDV | 381430 | VSWVR |
| 274764 | YTSSK | 327762 | LLLKY | 358770 | HSTGS | 381436 | ESPWY |
| 274766 | QVKEK | 327763 | KNTYI | 358771 | WLPCN | 381437 | CPGWS |
| 274773 | LRIWP | 327764 | LELQV | 358777 | LTQIV | 381438 | IETLR |
| 274787 | MKSRP | 327777 | TTDWS | 358778 | KMHQK | 381441 | NMKHF |
| 274793 | IEKYN | 327786 | DSRQQ | 358783 | SILRC | 381444 | RAHLS |
| 274811 | PREAE | 327796 | CFPFS | 358784 | IFTDV | 381447 | IRRMN |
| 274813 | KQQSV | 327801 | VKDEL | 358786 | EKSRK | 381454 | CAGQC |
| 274849 | LVRDS | 327813 | PGWEQ | 358789 | LEKKN | 381457 | TGMSH |
| 274853 | ESCRR | 327815 | DSREP | 358794 | KNSLT | 381458 | GCILK |
| 274867 | NRLNY | 327821 | QRAKP | 358795 | TYRSS | 381461 | VLGDV |
| 274897 | DSKEQ | 327824 | HYMAR | 358798 | QHTDV | 381468 | YGKCD |
| 274979 | SQLQQ | 327845 | GMKAM | 358799 | ALTLL | 381471 | EEYFI |
| 274990 | NFPCG | 327846 | RKHKF | 358802 | LFLPH | 381473 | MFSCL |
| 275015 | LLCTD | 327850 | TSTHS | 358807 | LNWTT | 381474 | PGPCG |
| 275016 | YKQRI | 327875 | QDSAL | 358810 | EELLQ | 381478 | PIPCS |
| 275034 | NLIGW | 327879 | EFCSH | 358812 | SVLED | 381479 | IPGCP |
| 275053 | ENDNT | 327889 | LRQGT | 358814 | NYYRY | 381484 | EDPLL |
| 275072 | VNAVE | 327890 | VVQKT | 358815 | KIYRP | 381486 | SGVDG |
| 275159 | RLQST | 327916 | QEWGK | 358820 | LGISP | 381487 | DLCTK |
| 275162 | LLSLD | 327917 | DQYCC | 358825 | RALHS | 381488 | QPSCC |
| 275169 | SPSEV | 327934 | PPRRP | 358827 | TWNSK | 381489 | CGSSC |
| 275189 | KSKPL | 327943 | WGFYA | 358831 | KAKGD | 381491 | HSQAS |
| 275198 | FSEHI | 327947 | KPHLY | 358838 | VWGNK | 381495 | RTSSC |
| 275200 | SLFLE | 327950 | LTPTP | 358841 | ASRSY | 381497 | LAKLK |
| 275209 | GCKGS | 327959 | AKLTA | 358845 | VWGNK | 381499 | SELGF |
| 275216 | LELSS | 327968 | CCPGP | 358851 | VWGNK | 381503 | RSSSK |
| 275227 | LPNET | 327975 | NVPEE | 358853 | SKAEP | 381504 | SHVPL |
| 275229 | LNSRI | 327988 | CLQEL | 358854 | AYSPQ | 381511 | KAATH |
| 275230 | LSPET | 327994 | QPTKL | 358857 | EGNPF | 381514 | ISACT |
| 275235 | LGPSS | 327996 | QELCP | 358858 | SPGPQ | 381518 | DIHAQ |
| 275254 | ESDSD | 328004 | NGESH | 358861 | EVALR | 381531 | LTVLS |
| 275358 | QIRRH | 328013 | GQTSH | 358862 | PLKIT | 381534 | VHVYM |
| 275364 | DIMLQ | 328016 | DEKVL | 358865 | SSQKI | 381535 | QNNNL |
| 275428 | ETQTL | 328017 | GLLCW | 358866 | RVVVP | 381536 | EPEGE |
| 275461 | KKESG | 328023 | ALMKA | 358867 | ECGLY | 381537 | SSDLR |
| 275493 | EFIGA | 328030 | FCLMP | 358878 | TPIVV | 381540 | GGGCC |
| 275513 | EKWIQ | 328036 | ELTIT | 358886 | KSKAH | 381542 | CQCKI |
| 275517 | DLLVE | 328043 | DALVR | 358888 | AVEKQ | 381545 | AHCFF |
| 275523 | EVDED | 328054 | SNVVR | 358894 | NEGAI | 381547 | FKNPQ |
| 275524 | SEENE | 328055 | LCRTP | 358896 | TKKSC | 381553 | SKLPP |
| 275525 | FNVQN | 328061 | TEKLN | 358900 | GVRET | 381554 | KAGVF |
| 275546 | LRLLP | 328062 | DPVVK | 358902 | FGKMS | 381558 | LTVSE |
| 275560 | LCQPS | 328069 | YGNNS | 358903 | AEGST | 381562 | STRPS |
| 275590 | YLRAS | 328070 | LLQLA | 358905 | SSSPS | 381566 | DWGTH |
| 275603 | SSLKG | 328077 | NLVKS | 358906 | LSQAG | 381567 | RQSLS |
| 275605 | GELEE | 328079 | PLNEF | 358909 | FNKGL | 381571 | PLLNI |
| 275635 | AATEA | 328082 | LPILH | 358918 | DSPLH | 381576 | AFLED |
| 275699 | ELKLT | 328083 | WSLPS | 358921 | HRKTF | 381577 | NQAAS |
| 275730 | TCTDL | 328085 | TKGSP | 358925 | PGPTR | 381578 | KQRLR |
| 275732 | SVDDY | 328088 | GQLTR | 358931 | CMLLN | 381579 | ITHRM |
| 275747 | WIFGE | 328090 | VYLGA | 358932 | LPWRL | 381580 | HFPLF |
| 275763 | TFLLR | 328100 | PRRRR | 358939 | EVTDA | 381583 | EMIIS |
| 275764 | DDEDL | 328103 | LEYRQ | 358945 | SVSPA | 381585 | IILLS |
| 275766 | VSCEK | 328110 | KAPRA | 358948 | PADGP | 381589 | PTSNQ |
| 275767 | KLESC | 328115 | SINKS | 358951 | SVSPA | 381590 | TPRCL |
| 275815 | QGFKD | 328118 | SAQES | 358953 | KYRFH | 381594 | KILKQ |
| 275820 | ASLRM | 328133 | RAWIS | 358956 | RKKHL | 381597 | PWDWE |
| 275874 | THCTC | 328137 | SQACY | 358957 | PADGP | 381599 | AQFPG |
| 275884 | FLHKK | 328144 | FRGKQ | 358963 | FKCTS | 381600 | LGLQA |
| 275954 | YEDYY | 328149 | PYCWS | 358964 | GFFST | 381605 | ADHGQ |
| 275988 | LVKKS | 328150 | RESEI | 358966 | DWEGN | 381606 | HVYSH |
| 276009 | GFGLA | 328160 | PVALV | 358967 | SVSPA | 381611 | PRQLQ |
| 276014 | QGLVL | 328164 | GSNPG | 358970 | VNLQV | 381615 | TGDAK |
| 276033 | PEEPI | 328166 | PYKCE | 358973 | TERVS | 381618 | KRTHT |
| 276049 | RENSW | 328169 | YAGKE | 358974 | ANYGS | 381620 | KRKPP |
| 276052 | VDTEF | 328173 | TPRED | 358982 | WTYNG | 381621 | HKERK |
| 276055 | ADGAT | 328174 | SVWGH | 358994 | QSLLK | 381622 | LTVSE |
| 276062 | LPEDE | 328178 | KLRSS | 358997 | DEFQS | 381624 | LTVSE |
| 276072 | LDSDE | 328181 | CKCSC | 358999 | GGKTR | 381627 | SRGKV |
| 276077 | TPELC | 328182 | RKKRP | 359000 | TSEVN | 381628 | NPPSE |
| 276079 | KRRRY | 328187 | ENIDE | 359001 | KADGQ | 381630 | SSLEV |
| 276096 | KSKKN | 328190 | QMQDQ | 359004 | KSADH | 381632 | FFVET |
| 276101 | ELEII | 328202 | VRRVS | 359006 | EVDCS | 381636 | NHPGQ |
| 276110 | LKPET | 328203 | TFLWS | 359018 | NRLKY | 381646 | PKERS |
| 276127 | SSSGN | 328207 | DGVGS | 359019 | VERPV | 381651 | HCARP |
| 276173 | DEEEK | 328215 | LLKRL | 359022 | KTKSQ | 381652 | RASIN |
| 276185 | KTLIK | 328216 | GSHYA | 359024 | KFDSE | 381653 | SKKKK |
| 276198 | RISSV | 328220 | QHPTT | 359025 | LIKDE | 381654 | ASFNA |
| 276201 | EGGEE | 328228 | GERKQ | 359031 | NSISD | 381655 | AAFWG |
| 276204 | RYAEV | 328230 | ACAES | 359032 | SDSAS | 381658 | SLGLG |
| 276211 | SYFFP | 328232 | RFSRR | 359034 | KRNEE | 381660 | TEARV |
| 276218 | SEFDG | 328236 | LMGLK | 359042 | KDETV | 381661 | RGPGK |
| 276241 | RSQSI | 328243 | GKNPT | 359045 | TPKPH | 381665 | VQHLE |
| 276282 | KHRNQ | 328245 | LRIHT | 359046 | EQFEF | 381666 | SPKEK |
| 276297 | DTKSR | 328251 | LIQVV | 359050 | FSTIS | 381669 | SPGCL |
| 276326 | DLFKF | 328264 | TAPLP | 359052 | VVIKR | 381670 | SLGLG |
| 276344 | EEEGV | 328270 | ASSCC | 359053 | QRMIG | 381674 | ISLAR |
| 276345 | DTEIP | 328271 | CCSHF | 359055 | QRMAG | 381675 | DLLEI |
| 276369 | VYHMY | 328277 | RTGAS | 359067 | ADITI | 381679 | NTERS |
| 276373 | PDHEE | 328307 | ASKED | 359070 | PGPLL | 381683 | GKAST |
| 276390 | DSAKH | 328325 | RFENN | 359073 | VEEDE | 381684 | CFTNK |
| 276410 | NTGKS | 328326 | YETTL | 359085 | SPLVF | 381688 | LKCSG |
| 276414 | GQKKI | 328327 | KFDDI | 359095 | FAMED | 381689 | DLQHW |
| 276416 | IVADD | 328335 | LQVYI | 359096 | AESKL | 381694 | PYKCK |
| 276420 | KKGPK | 328336 | LVRKK | 359098 | PKKQE | 381695 | EDENQ |
| 276431 | DSAMS | 328340 | KQVKV | 359100 | AESKL | 381697 | FLKPA |
| 276440 | EPGSQ | 328347 | SKPSR | 359107 | SFSRL | 381703 | KLHQK |
| 276449 | SEARC | 328352 | RFVRH | 359115 | LSHSV | 381706 | ANCYM |
| 276461 | ATKEN | 328358 | SSQRY | 359119 | PWLNP | 381707 | AAECG |
| 276480 | KGIHV | 328359 | WAFCC | 359123 | SINGL | 381710 | VGESW |
| 276497 | YQQQP | 328364 | ADFFL | 359128 | QGGRP | 381711 | RPSPP |
| 276530 | MSSGR | 328370 | SEQFK | 359131 | YKRKI | 381712 | SEPWV |
| 276533 | AVQLI | 328376 | AATPS | 359149 | DFQNP | 381714 | LTVVE |
| 276569 | RSFYW | 328397 | FCCRS | 359151 | LLDLK | 381715 | SHHTW |
| 276570 | YCTDS | 328400 | WPILL | 359155 | MALEI | 381716 | LIKHK |
| 276571 | EIIGK | 328402 | KKKKH | 359160 | PETTA | 381719 | NQTME |
| 276585 | EHHEK | 328403 | IKVPS | 359170 | DCKTQ | 381720 | KECTL |
| 276590 | WKAHL | 328405 | FGFLS | 359171 | QDTNV | 381724 | FGLSD |
| 276594 | FHEDY | 328409 | SNLCA | 359172 | NPTKA | 381725 | LGPGS |
| 276603 | SDSED | 328410 | TSEEV | 359196 | AGPPS | 381730 | ILTGL |
| 276616 | LSALL | 328411 | ATSNS | 359204 | RAYKD | 381731 | GEIVE |
| 276646 | FRIKT | 328412 | QYGII | 359206 | TYISR | 381734 | IFCHC |
| 276651 | KQAHP | 328422 | IRWNR | 359211 | VNPVC | 381738 | ERGSP |
| 276654 | ALLLC | 328423 | AGLRN | 359212 | IDVDD | 381741 | LFMDE |
| 276658 | GVKLS | 328426 | RSSYW | 359215 | ASACE | 381744 | ILTGL |
| 276659 | DRANQ | 328429 | RPLHK | 359216 | SKSTI | 381747 | ALPKQ |
| 276681 | RRWRP | 328430 | GYKLT | 359219 | NDDYY | 381752 | DKAFN |
| 276682 | QEYNN | 328432 | RPSCC | 359221 | LALVK | 381754 | AQRDA |
| 276689 | RERPM | 328444 | ASSCC | 359222 | NGKLD | 381758 | MTMWG |
| 276692 | FFPGI | 328452 | RNPSR | 359224 | LGRIV | 381759 | FIEGH |
| 276704 | IQILA | 328455 | LLSKC | 359225 | QGIDY | 381761 | LDIEI |
| 276708 | QLAEA | 328464 | QLREE | 359231 | ELMEK | 381766 | ESTKM |
| 276737 | LNYFK | 328472 | EPAAD | 359233 | VEFGS | 381767 | HHTWP |
| 276770 | PRSQD | 328478 | AADEP | 359234 | PCCPG | 381770 | PQPPE |
| 276779 | PRSQD | 328484 | HHKTK | 359240 | TATEI | 381776 | VEMPL |
| 276816 | IHTRE | 328487 | SAASL | 359257 | PASGL | 381778 | WPSRN |
| 276844 | AGQSP | 328495 | AGDSQ | 359258 | KRRGS | 381780 | LIQKR |
| 276893 | YSKGR | 328511 | VETDV | 359262 | SVKAA | 381784 | LTAIS |
| 276914 | EHKTH | 328515 | VHGAE | 359275 | AVTYI | 381785 | MNARL |
| 276925 | TATGD | 328521 | GKVQP | 359277 | APKLG | 381786 | DRFLQ |
| 276927 | LRRKE | 328524 | KGIDI | 359279 | APMRF | 381788 | QNSRP |
| 276943 | LFRRK | 328545 | QFKTK | 359282 | EECDN | 381793 | IRVAL |
| 276960 | FCTIL | 328547 | YFACE | 359284 | EECDN | 381796 | LGHPI |
| 276978 | LWEGI | 328551 | MCAVQ | 359285 | LAGMI | 381798 | GCFNI |
| 277010 | FGQDP | 328552 | FPEVT | 359286 | KSKAK | 381800 | PELMS |
| 277082 | KTGSH | 328553 | CVKYS | 359290 | DDDDI | 381802 | GGALG |
| 277120 | LDILG | 328563 | RILIQ | 359291 | YEKLF | 381804 | QFPDL |
| 277165 | LNKEE | 328570 | DQDSK | 359292 | SYCLK | 381805 | MSSYV |
| 277216 | KAINQ | 328580 | GVSHT | 359297 | LRRVK | 381806 | GASQP |
| 277225 | EAKKE | 328592 | RRVLW | 359300 | KTSLY | 381811 | PPGSG |
| 277239 | RLDPE | 328598 | SQEPS | 359301 | REGEE | 381813 | LGPGI |
| 277244 | KQEAK | 328605 | HSSHT | 359310 | TKGSP | 381815 | GFADY |
| 277309 | SASDS | 328610 | VRIEK | 359313 | RKSRT | 381817 | PGLES |
| 277458 | VEDDI | 328614 | SSPGA | 359319 | ATPPY | 381823 | QQVNK |
| 277491 | ITSPE | 328625 | WSSVY | 359321 | GATAS | 381826 | MGTCL |
| 277508 | EPCRF | 328631 | LVNKF | 359323 | QEREL | 381829 | IFQDC |
| 277517 | KIHRV | 328640 | LYKTN | 359333 | YTNDS | 381830 | APFCL |
| 277526 | PPMRE | 328671 | ATLSC | 359334 | MIRKQ | 381832 | VDLFH |
| 277531 | SDQDG | 328672 | SSVLD | 359339 | VFDEF | 381835 | FFTKT |
| 277540 | EWEGN | 328673 | AEGQY | 359340 | VYLPA | 381845 | QYWRK |
| 277549 | QDHWC | 328674 | TKNYV | 359345 | RAAES | 381848 | KINPI |
| 277554 | YAGTL | 328677 | LLPFL | 359349 | NGLKT | 381851 | SDSHF |
| 277570 | LRESS | 328690 | STSAN | 359353 | VCLNL | 381852 | HHAQP |
| 277575 | ESVLL | 328694 | HVKER | 359356 | YSTTV | 381853 | PPGFK |
| 277598 | KPRKH | 328695 | QVETR | 359358 | SRDRQ | 381856 | PQPGV |
| 277632 | SPSLN | 328708 | SSSAY | 359361 | PKKFH | 381857 | AVLIG |
| 277668 | HFDTI | 328720 | PGTGE | 359366 | SSVAY | 381860 | LVLST |
| 277705 | VAKTI | 328722 | NVTRP | 359368 | SCLPE | 381864 | RLGAF |
| 277746 | GFMNN | 328729 | KLERI | 359369 | ALLLC | 381873 | LGTYY |
| 277865 | GVTFT | 328732 | SEANN | 359370 | HKLLV | 381875 | ADTVL |
| 277882 | AKCEG | 328736 | AFRGS | 359371 | CHEKP | 381878 | ITLKL |
| 277895 | KAKLF | 328737 | FAFRD | 359372 | FGSRV | 381883 | LTLRS |
| 277903 | SESGF | 328738 | KIGRT | 359375 | LWMNQ | 381889 | GQVPS |
| 277942 | PAWDI | 328747 | SQSQS | 359376 | THEDL | 381892 | TIEDD |
| 278025 | VATGC | 328768 | RLFQA | 359378 | PGADK | 381893 | SEAEV |
| 278060 | PRPRL | 328773 | SKFGD | 359380 | NYKSG | 381894 | IQGSH |
| 278070 | KNLRR | 328777 | MLLTL | 359382 | SNKPC | 381895 | KHQMK |
| 278174 | QNPML | 328783 | DQYCC | 359385 | NIGIK | 381897 | CLVVR |
| 278175 | APHFL | 328788 | CLAFL | 359386 | EGKQD | 381898 | CEFIA |
| 278187 | KKEIK | 328800 | SQVHS | 359388 | QDPVA | 381900 | EVFQE |
| 278193 | RRQQT | 328801 | FLNDI | 359392 | PVTRL | 381903 | CEFMA |
| 278198 | QETQI | 328813 | KAINV | 359393 | EEEDE | 381906 | NSLRP |
| 278200 | RFSDD | 328818 | IEESC | 359396 | GPWMK | 381914 | KVLGL |
| 278207 | LPEKY | 328829 | LCIWH | 359401 | SVNPN | 381921 | NTCSG |
| 278222 | LPKKY | 328835 | EDFEF | 359403 | EPARI | 381922 | SMQYI |
| 278243 | EEKRF | 328847 | FSSDV | 359404 | LETQH | 381925 | CQALF |
| 278279 | IRHLK | 328854 | HFTLS | 359410 | TRKKD | 381926 | STLGG |
| 278282 | SSLCN | 328858 | PAGKD | 359411 | SSLYP | 381930 | IWSYS |
| 278314 | RRGNL | 328866 | SLDDC | 359417 | VHTSV | 381932 | PVASS |
| 278319 | TRDKS | 328874 | FQCTD | 359424 | SWLTE | 381935 | CVEVS |
| 278353 | KTKKN | 328875 | VLKED | 359428 | YGNDP | 381937 | QGLFR |
| 278359 | ENGIV | 328878 | LKTNH | 359433 | IRDML | 381942 | TTGAR |
| 278360 | ERNMK | 328879 | CVLDL | 359436 | KESTG | 381948 | TQGQT |
| 278379 | WKREK | 328889 | QERLR | 359440 | PEESF | 381951 | RTSEA |
| 278385 | MKIGV | 328901 | APSGV | 359444 | ADQST | 381953 | ISALF |
| 278407 | YDPRA | 328911 | RRKRN | 359446 | QRGPA | 381954 | ELKPL |
| 278409 | TSSFL | 328915 | SHCLC | 359449 | IEMPD | 381957 | ISFLL |
| 278412 | SGSDE | 328928 | GPRAL | 359454 | FDGIF | 381959 | LVRRL |
| 278426 | SEVTA | 328934 | ATSDA | 359458 | FYFSE | 381960 | KQKCQ |
| 278456 | NGYIA | 328938 | KTIFQ | 359459 | YIYIY | 381961 | LHQWH |
| 278483 | LFWKT | 328939 | LSSSS | 359460 | PEESF | 381962 | LGLQA |
| 278499 | TRHLT | 328940 | DLLET | 359462 | GVQPP | 381968 | FELED |
| 278505 | NSGEL | 328952 | DLNEM | 359464 | VVLVQ | 381969 | FSNPV |
| 278520 | EKFEL | 328957 | GKSPK | 359474 | TPHPR | 381970 | LEYLS |
| 278544 | PLRKH | 328968 | RESIV | 359478 | NSTKF | 381975 | ERLQP |
| 278550 | EMGRR | 328980 | RIHIR | 359483 | QMKTE | 381977 | PCLCL |
| 278568 | TDCCS | 328983 | SHPRN | 359484 | TQLWK | 381980 | LPATT |
| 278572 | PVPTA | 328986 | TTTTV | 359485 | HKLPF | 381982 | IVVGS |
| 278590 | SQLGY | 328989 | FILWP | 359489 | DAHLL | 381986 | SSSFS |
| 278601 | NGTLV | 328990 | AHPSH | 359490 | LGSRI | 381987 | WLRDT |
| 278612 | LHYDE | 328992 | LIEGK | 359497 | ICNIL | 381989 | KATNE |
| 278616 | WKAWV | 328998 | QTSLR | 359498 | EHGDE | 381993 | KGKIF |
| 278618 | NGTKS | 329000 | VDFRP | 359504 | ACTIS | 381998 | LSSLE |
| 278671 | QFGIP | 329008 | SGGSQ | 359505 | RCIDF | 382000 | PRTGS |
| 278715 | LNDAH | 329009 | SQDGR | 359506 | VNGVP | 382001 | NRLAA |
| 278723 | SSEPE | 329029 | EDDGY | 359507 | KNILV | 382003 | WAVRR |
| 278742 | ENTGV | 329033 | LKCFD | 359512 | HKLKI | 382006 | NMAKP |
| 278752 | KNDEL | 329034 | DKKAQ | 359518 | KRRRT | 382011 | RKKVP |
| 278765 | EPAGY | 329036 | PLPPP | 359520 | VQVGP | 382017 | SQASL |
| 278772 | HQRTH | 329040 | DIKYR | 359521 | AISQL | 382021 | KEITY |
| 278779 | KPHHF | 329051 | VAAPA | 359524 | ENDQS | 382027 | IAISV |
| 278780 | EEERK | 329054 | GLEDK | 359525 | AMNSI | 382030 | LKENF |
| 278816 | LRLRR | 329056 | ISGDK | 359526 | WRAGK | 382031 | LENIA |
| 278823 | IVLED | 329069 | AGLPT | 359529 | EGGED | 382033 | WRALG |
| 278826 | MQVRR | 329080 | QFLPL | 359531 | KLPQL | 382036 | WRALG |
| 278833 | DLSEA | 329106 | PRSQK | 359532 | RETLY | 382040 | HSRDG |
| 278836 | YRLCD | 329112 | DETHS | 359534 | DSGED | 382042 | WRALG |
| 278840 | AYLHK | 329115 | HHNSM | 359535 | NAVSN | 382045 | GSDSE |
| 278845 | SSLDV | 329117 | GNLAK | 359539 | VTKIQ | 382046 | HSRDG |
| 278853 | ESNRQ | 329123 | KSRGR | 359540 | NVTVQ | 382050 | EKITS |
| 278855 | SPNLL | 329124 | SYLVS | 359546 | EIPAK | 382055 | LLQLA |
| 278856 | GSTSP | 329127 | PELQP | 359551 | HLRAQ | 382074 | RSVAR |
| 278865 | PPNSV | 329137 | LLLGT | 359552 | IADWC | 382075 | WAVRR |
| 278882 | DREPN | 329140 | VNTTF | 359553 | RAQWL | 382076 | TPGQE |
| 278886 | AALSV | 329141 | GNYSG | 359557 | EEDDY | 382080 | SSKDL |
| 278888 | PPIDL | 329144 | EAKKS | 359561 | ERPKK | 382086 | SSSPH |
| 278903 | ATAGH | 329153 | SASDK | 359563 | IDWKI | 382093 | RVFRY |
| 278911 | REEPS | 329161 | EAPEM | 359566 | HVCTA | 382097 | VPVDQ |
| 278916 | WLPAT | 329163 | QWPVA | 359567 | PLTHI | 382098 | LLSLL |
| 278919 | VLCPT | 329165 | QSRPL | 359571 | VTLND | 382099 | TFVLQ |
| 278921 | AIFAF | 329170 | QTPVQ | 359573 | DQKVC | 382105 | PQLPE |
| 278927 | AGSLV | 329189 | QTAFT | 359581 | YPKSN | 382107 | SREGV |
| 278934 | MQTHV | 329190 | RARLS | 359583 | ACRYR | 382108 | KTKKK |
| 278935 | KVYRF | 329200 | FLEEI | 359596 | GTKLL | 382109 | ASFQA |
| 278937 | LEDTD | 329205 | VESVM | 359598 | VTMFE | 382110 | AYYET |
| 278947 | DDGAK | 329210 | QKPPY | 359601 | SVYSA | 382111 | LIHTA |
| 278949 | YEETY | 329212 | QSAGR | 359606 | VGNEN | 382113 | TLRAP |
| 278951 | AGPVT | 329213 | AMFET | 359607 | DLKSM | 382114 | RGIQV |
| 278968 | RQIIS | 329214 | NWTLS | 359610 | MALLY | 382122 | KAFST |
| 278976 | SLYLT | 329229 | EVHPS | 359622 | HDTDT | 382123 | LHGSS |
| 278979 | SSCTR | 329233 | PLPPE | 359629 | CEPSC | 382124 | ILQQN |
| 278980 | MECFC | 329243 | RSARD | 359634 | GAGAR | 382127 | LMTSD |
| 278990 | DAPQM | 329246 | TMVKQ | 359635 | HNEST | 382128 | KETPF |
| 278994 | DLLKE | 329250 | GQKRK | 359640 | LIPIS | 382131 | GKYVD |
| 279022 | KDKDD | 329256 | FPPGF | 359643 | NKSTS | 382133 | DFQRE |
| 279024 | PLASL | 329264 | HLLEH | 359645 | GRSRY | 382134 | VSFLL |
| 279027 | TFRTL | 329265 | EPAGY | 359649 | VPGFK | 382139 | ARQHG |
| 279028 | HDRPG | 329266 | GARRP | 359650 | VPPFK | 382141 | KKIAS |
| 279036 | GVPPL | 329271 | GRCWH | 359651 | GYCYD | 382145 | KGNQI |
| 279052 | LGKTT | 329275 | QPALA | 359652 | DLHLV | 382146 | SLTIH |
| 279058 | YKPPR | 329287 | PEVHG | 359655 | GHTFD | 382147 | QVRSR |
| 279067 | ELSPC | 329292 | ADIHV | 359663 | GLLKL | 382149 | TTEWS |
| 279101 | LTQQF | 329295 | YYPSG | 359664 | KLLQR | 382154 | WDDTA |
| 279146 | GIFSH | 329301 | KSHKE | 359665 | FFSWW | 382155 | REMEA |
| 279147 | SGLSF | 329303 | GEAAT | 359666 | AFVSP | 382157 | DLQSV |
| 279168 | RLSRY | 329312 | PAECS | 359668 | YLQHL | 382160 | RQTTR |
| 279178 | EVTQF | 329318 | VASQN | 359674 | PNRRH | 382165 | WRPKI |
| 279206 | LLPPL | 329343 | LLPDD | 359675 | VCSFL | 382167 | KERKK |
| 279227 | GHEAF | 329353 | LPLGS | 359680 | SNGWL | 382169 | PMGTV |
| 279230 | ENTQL | 329355 | DQAVS | 359682 | AEDRF | 382172 | IEKLL |
| 279242 | LEKGF | 329356 | PCVSS | 359685 | NCCIQ | 382178 | LSPRR |
| 279247 | LTMFA | 329357 | SGNGF | 359686 | YCSSP | 382186 | LSSWD |
| 279249 | MQIPT | 329360 | PEPQL | 359688 | RKFHL | 382189 | ARISL |
| 279259 | PNANS | 329361 | LIFYA | 359691 | LEYFI | 382190 | PSSWD |
| 279263 | MPYIY | 329365 | KTIHT | 359693 | LLKLE | 382191 | RGSHL |
| 279281 | ICERG | 329372 | FPRAH | 359694 | DTFRQ | 382193 | VRVPQ |
| 279386 | SKPMY | 329374 | NPTEA | 359698 | PPPQD | 382196 | EIPAK |
| 279387 | ADYFL | 329380 | SGHSL | 359699 | YESCK | 382197 | QVIQF |
| 279392 | DGESN | 329384 | RNACI | 359709 | AGSCL | 382200 | FFYFL |
| 279396 | SRTRL | 329395 | GLEKD | 359719 | EFGEF | 382203 | LLRSL |
| 279434 | EAAHH | 329403 | AGSQS | 359727 | ESRFN | 382204 | DMEEN |
| 279441 | SWLHC | 329411 | LEQPA | 359729 | RHGPA | 382208 | LLSTF |
| 279463 | PSTSW | 329418 | FPFQI | 359740 | SLEEM | 382211 | NDTAS |
| 279477 | WKQKA | 329419 | DILDD | 359741 | RRQGC | 382212 | PILLC |
| 279488 | SLQST | 329426 | RETSM | 359752 | LVTSL | 382213 | STSDD |
| 279544 | WICQY | 329428 | YNDKF | 359754 | LKRMI | 382215 | RKYIL |
| 279573 | GQPPQ | 329431 | LYEVM | 359759 | LKRMI | 382218 | KKQEA |
| 279593 | IESDV | 329435 | RAHLS | 359766 | LKRMI | 382219 | WHKSW |
| 279716 | SATTC | 329448 | RRRSQ | 359768 | IWNLK | 382222 | ERLHT |
| 279783 | FKIPI | 329452 | LQENW | 359769 | LKRMI | 382230 | KDSFK |
| 279791 | TYVRQ | 329463 | FCDHT | 359772 | LKRMI | 382235 | PTNFK |
| 279804 | PGGSA | 329466 | RKKVT | 359777 | LKRMI | 382237 | SHHTP |
| 279839 | EKYIK | 329467 | LCKEK | 359778 | FGCLR | 382239 | KLTLL |
| 279873 | PSTKL | 329471 | LSLPA | 359782 | SQDIK | 382241 | QQKCS |
| 279907 | KMTVE | 329482 | YKRPF | 359783 | AQGKK | 382245 | ASQAA |
| 279934 | RRSSL | 329492 | GGLLK | 359787 | LQPCI | 382246 | SLSSE |
| 279968 | PLHSY | 329499 | PSFSP | 359788 | SRSSC | 382249 | MTVSS |
| 279992 | KRYRE | 329503 | KKWDH | 359793 | KSAST | 382250 | KKRKK |
| 280056 | YKQGN | 329507 | KGENQ | 359795 | KRRGL | 382253 | DSDSG |
| 280057 | EEFYI | 329522 | RTLIS | 359799 | HLPAS | 382267 | ATNNS |
| 280082 | ATKYV | 329528 | LLDMI | 359802 | LVSPN | 382273 | RKLVQ |
| 280083 | PQQET | 329539 | VIEVS | 359803 | HHHLY | 382277 | AFGGQ |
| 280097 | IVIEA | 329548 | TVQKK | 359805 | KSSKR | 382280 | SRLLN |
| 280098 | RLKQS | 329551 | LFSEK | 359810 | LWTLK | 382285 | TFTKL |
| 280115 | VLPLL | 329553 | QREEE | 359813 | AILRT | 382298 | ARLEF |
| 280154 | KPESY | 329554 | RGERA | 359820 | RQTFN | 382302 | TPDLK |
| 280155 | RKRIV | 329557 | STQSG | 359827 | EAKVQ | 382303 | FWDKV |
| 280187 | LNAYT | 329558 | SQRRL | 359831 | LQGQR | 382307 | LANFF |
| 280190 | RLNPF | 329565 | RAHLS | 359837 | FPANR | 382308 | MVSIS |
| 280191 | MDKKP | 329568 | CDFFC | 359845 | TGDFF | 382310 | GKLGQ |
| 280193 | PQMMS | 329584 | IDIRD | 359848 | MKFIF | 382320 | KERKK |
| 280200 | PKTRV | 329586 | TYGLQ | 359864 | QREWR | 382328 | KKKIS |
| 280236 | ECKEP | 329603 | FRSPR | 359866 | SCGCH | 382329 | ACQWS |
| 280245 | MKSFL | 329612 | TGGKE | 359869 | TLQKE | 382332 | LVAQR |
| 280258 | DCREG | 329614 | LFGGS | 359871 | DKYKN | 382334 | KVLFT |
| 280295 | EQRDH | 329617 | AHVPE | 359885 | GNYQQ | 382335 | QSRVR |
| 280326 | GESEE | 329623 | YLGHK | 359890 | NQLKF | 382339 | LASAA |
| 280330 | LPIQA | 329626 | GCWQK | 359891 | SVMAV | 382342 | DAGLV |
| 280346 | ITMLL | 329632 | NPAFF | 359892 | QKQKE | 382345 | RSLHL |
| 280350 | TMPLV | 329634 | ALEHF | 359899 | PLQNW | 382346 | LHCYH |
| 280354 | QKGGQ | 329638 | STHLN | 359904 | FPEDY | 382349 | EWRGR |
| 280357 | VQNED | 329640 | CGGDD | 359910 | QKKAS | 382354 | VITLL |
| 280358 | NTLHR | 329647 | YDVFN | 359924 | ADESP | 382355 | TPRQS |
| 280362 | VYKGE | 329654 | KNSIK | 359925 | VTTSV | 382356 | TCIQG |
| 280377 | CMHTN | 329662 | PKGRK | 359928 | FEDSS | 382360 | AAFWA |
| 280481 | DSSEV | 329663 | GPHSS | 359939 | EFLQT | 382362 | IKGKK |
| 280527 | FYQTV | 329668 | LHSNK | 359940 | LPVPI | 382363 | GVSQC |
| 280557 | GEVKK | 329674 | SGSPD | 359942 | VPVSI | 382364 | KEKKK |
| 280560 | GSHKA | 329684 | TVDVA | 359956 | LKSKN | 382368 | MQQKR |
| 280571 | SGKQT | 329685 | KLGLF | 359972 | SVQLS | 382374 | HGPQH |
| 280576 | TLNSD | 329686 | FQNVM | 359976 | SGSHS | 382375 | SNDLY |
| 280605 | LTLMK | 329689 | FAQGE | 359980 | QMLKI | 382382 | DLTQD |
| 280606 | QPTSC | 329697 | PHSSS | 359982 | RFPDL | 382383 | RPSPI |
| 280612 | EEDKL | 329698 | LKLVE | 359988 | MDMSD | 382385 | NCIHI |
| 280614 | SDGLS | 329715 | QIVKK | 359990 | DRIPT | 382387 | GRMGM |
| 280663 | PQLLR | 329735 | DVSYL | 359991 | GKAKK | 382388 | RVIAD |
| 280665 | MKKTM | 329736 | REGEE | 359994 | RREGL | 382389 | CLSLV |
| 280684 | MLTEV | 329738 | THTRV | 359998 | NIFRP | 382394 | DMFSV |
| 280696 | EVFED | 329748 | LQTQI | 360003 | DEECG | 382395 | LVIAT |
| 280700 | KFSDL | 329757 | ILSTK | 360009 | RKYQN | 382396 | SPSIS |
| 280701 | CIAGL | 329761 | EGQGS | 360017 | GCSLK | 382398 | HDEAC |
| 280704 | KDLIF | 329774 | NAIFG | 360018 | LCSFP | 382399 | LGLQA |
| 280706 | KELKL | 329777 | LPETL | 360020 | KCIIM | 382406 | PTDRH |
| 280734 | LTKAN | 329786 | RPAHR | 360021 | TCIIL | 382407 | NTCGK |
| 280749 | SKKKK | 329793 | EKLQI | 360025 | NLPER | 382415 | TPGLK |
| 280756 | KDKSD | 329794 | RPYPI | 360031 | KDRRP | 382416 | SPLAW |
| 280758 | KGSVV | 329795 | GIRGR | 360034 | FPALA | 382418 | LPTAA |
| 280772 | KKSHS | 329797 | KEYFI | 360035 | WIHFI | 382422 | QRGSA |
| 280800 | KVSWD | 329803 | FKYII | 360045 | ILNAS | 382423 | FRTTW |
| 280871 | ASDVE | 329825 | LWEGI | 360054 | RFHRP | 382424 | GPWPQ |
| 280886 | VAYNM | 329846 | KHARH | 360058 | SGSLL | 382429 | CGKAF |
| 280892 | NRFVV | 329847 | SFGLV | 360060 | LVPGS | 382434 | GQCPS |
| 280904 | ACMKR | 329858 | CPSVG | 360065 | SNQSA | 382437 | QKTNK |
| 280961 | PDECV | 329860 | LQESK | 360069 | LVIEI | 382438 | QELNH |
| 280979 | RNMHR | 329865 | RVVCL | 360073 | KIFRF | 382441 | KGRKP |
| 280987 | VSVPP | 329869 | LPRAL | 360090 | KCSVD | 382443 | DSDSG |
| 281017 | RRKED | 329880 | SFRFP | 360104 | SWEQW | 382450 | LPVLE |
| 281030 | TGQVW | 329885 | IIFDV | 360107 | RAFSN | 382452 | PPASP |
| 281031 | FHPIR | 329890 | RLCCR | 360108 | QKPLY | 382453 | VIEMS |
| 281038 | HSCLL | 329896 | QRKED | 360113 | VDAEC | 382454 | FFFFG |
| 281043 | HARTC | 329902 | KNGDG | 360117 | NTSED | 382455 | KPQYF |
| 281047 | RAQSA | 329904 | EIINS | 360120 | ISAEL | 382458 | EPRSH |
| 281081 | PSPSE | 329906 | RKYHL | 360124 | PTVIT | 382459 | PSGVA |
| 281092 | KRKLT | 329908 | YMAIQ | 360129 | YSLIS | 382461 | QKKRP |
| 281129 | EEYGS | 329915 | SNIYT | 360133 | KAILN | 382463 | PEANT |
| 281131 | KETPL | 329918 | IRIFS | 360141 | QYELL | 382466 | ECLPD |
| 281133 | FAGGN | 329920 | QSSPQ | 360147 | LGWSV | 382468 | YYHRL |
| 281141 | QQEDD | 329926 | YFSKV | 360154 | GSEED | 382473 | VCMCV |
| 281142 | NLENI | 329930 | PELFS | 360157 | KWPAQ | 382475 | PEASV |
| 281146 | EKCDI | 329932 | THVQT | 360158 | IQEQL | 382477 | EHWVW |
| 281154 | DIGGR | 329933 | SNSVP | 360163 | FSAFS | 382479 | AQKAK |
| 281156 | PYGRY | 329943 | PEPGL | 360165 | QRRCF | 382480 | AGFKL |
| 281171 | NVSKS | 329956 | IAPGP | 360166 | NREHS | 382483 | LYPTH |
| 281172 | EGSSH | 329964 | MTWMH | 360167 | AGLWS | 382485 | FAIFG |
| 281182 | SLLQE | 329967 | NVDCL | 360170 | SESFE | 382486 | SEVRT |
| 281187 | NNCRQ | 329968 | VLVLG | 360171 | EIGRR | 382488 | RWRLQ |
| 281189 | LKTAN | 329970 | EGSDS | 360177 | PRGPV | 382489 | SRRLQ |
| 281228 | LNLIL | 329982 | YKRIS | 360180 | RMLKL | 382490 | ALHHD |
| 281243 | TPAYF | 329990 | TKTSI | 360181 | CLKAP | 382491 | VLSSI |
| 281273 | HRQAS | 329991 | HPEST | 360184 | NVKID | 382492 | RTPPL |
| 281282 | VASQI | 329993 | NPNIL | 360190 | CCLQQ | 382495 | TGQFR |
| 281321 | YSAGI | 329995 | RYINQ | 360195 | RSLGL | 382496 | HRARP |
| 281339 | GRSFC | 329996 | WQLVS | 360197 | GNNIP | 382507 | LQQLK |
| 281382 | TYKNN | 330005 | LPVFC | 360198 | QMTAD | 382513 | PSETS |
| 281416 | AAGGH | 330010 | TAVAS | 360209 | TMTPH | 382514 | TDKFQ |
| 281419 | HFIAD | 330027 | RGALH | 360210 | KQGVH | 382517 | TDKFQ |
| 281437 | PPPLS | 330031 | RLFYL | 360211 | HILFL | 382519 | WLSPM |
| 281441 | GSDEE | 330032 | KLSKA | 360214 | RLSLE | 382520 | QELLY |
| 281445 | PADDV | 330035 | WRGPW | 360216 | WERNA | 382521 | FYKMG |
| 281453 | LLDQG | 330049 | IPLPC | 360217 | VPKTR | 382524 | YSSVS |
| 281455 | STIKV | 330051 | EEHSD | 360222 | TQLYP | 382535 | RPLVS |
| 281456 | IKKYV | 330052 | GRIIG | 360233 | SWYLG | 382536 | RLQDQ |
| 281471 | TWTVY | 330054 | AQKAK | 360235 | ETNQL | 382540 | HCARP |
| 281474 | KPPHP | 330060 | TVQRK | 360237 | EEIKL | 382542 | YVSSL |
| 281508 | GVSPC | 330070 | APGPF | 360240 | TPATF | 382543 | PASAS |
| 281513 | AQHWV | 330072 | RRRWT | 360241 | ICLLV | 382544 | GKAST |
| 281523 | LFAPY | 330074 | AAKKK | 360244 | YLKEL | 382548 | LLESR |
| 281525 | SDESD | 330075 | SIAYC | 360247 | AVPQV | 382550 | RPAWA |
| 281527 | SSIFV | 330083 | QAHAP | 360248 | WKDMV | 382553 | ALERP |
| 281543 | TQSSK | 330085 | PQLQD | 360252 | ATTSD | 382554 | NESRS |
| 281581 | REFSR | 330087 | HRPFQ | 360262 | IMNDD | 382560 | IQETP |
| 281589 | GVPTV | 330098 | SPSPS | 360264 | MNRQG | 382569 | VITLL |
| 281620 | KSRKK | 330100 | RESLA | 360266 | QLQTF | 382572 | LEPRL |
| 281623 | SKRAR | 330101 | HSSTK | 360268 | QRNTN | 382577 | HQTTQ |
| 281631 | QTATG | 330113 | DGYYS | 360269 | KEPSL | 382579 | LTLSD |
| 281701 | ESLSR | 330138 | RISYL | 360270 | KRTGS | 382582 | PASLE |
| 281703 | GSTED | 330141 | WNSPT | 360272 | INHGS | 382584 | CQCKI |
| 281708 | DVDMK | 330146 | DPLDT | 360273 | AVLSS | 382585 | LLWAP |
| 281722 | QASFF | 330148 | HGTSI | 360275 | PQAGS | 382587 | TQLLS |
| 281741 | CSKVN | 330153 | RGALS | 360281 | TLDCS | 382589 | PYKCE |
| 281753 | FHFPP | 330158 | QRTQR | 360286 | PRNKK | 382594 | GEAVA |
| 281772 | VKKNR | 330160 | PSQLS | 360290 | TTLAR | 382596 | QTEDS |
| 281806 | LKSHF | 330161 | RRSKT | 360304 | FGGWI | 382604 | RSNRR |
| 281815 | VIFPQ | 330162 | LASCL | 360305 | TVFPK | 382606 | LSTPS |
| 281821 | RMVPV | 330165 | YPSRI | 360312 | PDTQG | 382609 | PPSVS |
| 281828 | VGPFL | 330172 | SRVAG | 360315 | ARGGS | 382612 | RSCLK |
| 281830 | IHQNS | 330180 | RDGQS | 360316 | KAARH | 382613 | DFLSN |
| 281834 | EFCVL | 330188 | GMDAV | 360317 | CFIPV | 382614 | DAAGL |
| 281871 | TRGST | 330196 | KWGNG | 360320 | SDPTP | 382616 | PQPPK |
| 281881 | DSKEI | 330199 | PESEL | 360323 | RAVSF | 382619 | LQLLG |
| 281882 | LGHRL | 330211 | RTPDE | 360324 | KELLG | 382620 | KLEKK |
| 281923 | CKDCL | 330216 | CCIHF | 360327 | PVQTV | 382621 | RMAKM |
| 281924 | YEMFE | 330218 | PLTHI | 360328 | NSKGT | 382626 | TSTEV |
| 281928 | IMNIL | 330219 | SLFSD | 360334 | NSKGT | 382629 | TSTEV |
| 281938 | EVTCT | 330221 | YLLYQ | 360337 | NSKGT | 382631 | VCIRG |
| 281950 | LTASQ | 330236 | WTMSH | 360338 | NSKGT | 382634 | HANTP |
| 281961 | RDSTV | 330240 | CRIQR | 360340 | ACGCH | 382635 | ITGTQ |
| 282003 | KATKS | 330247 | LSSAI | 360342 | NSKGT | 382642 | APHSS |
| 282018 | KETRV | 330248 | KIHTG | 360344 | NSKGT | 382645 | TKISR |
| 282020 | RGTSI | 330264 | QHIQE | 360345 | NSKGT | 382646 | KQLLA |
| 282026 | DSKRS | 330265 | NSSSF | 360350 | NSKGT | 382649 | KHRDI |
| 282030 | SEVLP | 330267 | QICLS | 360352 | NSKGT | 382650 | FGWSR |
| 282032 | NKHAG | 330271 | RGTQA | 360354 | NSKGT | 382654 | KKVEE |
| 282041 | LDHIR | 330276 | SSRLI | 360358 | NSKGT | 382655 | ITEGY |
| 282045 | SLLYQ | 330278 | GPTLL | 360359 | NSKGT | 382657 | AEVCP |
| 282050 | AGFEA | 330280 | KNAFS | 360365 | MKTYK | 382659 | ASGEK |
| 282058 | DMMEL | 330284 | CRAAA | 360366 | YLQDT | 382662 | RDIQK |
| 282059 | RKYLL | 330289 | MIQKL | 360371 | MTMSV | 382670 | KNCAG |
| 282074 | ATVYN | 330298 | TPLGG | 360372 | CFIPV | 382671 | GHELS |
| 282091 | KAKSQ | 330302 | REVYL | 360373 | YNYIA | 382673 | VQGNQ |
| 282096 | ADEEE | 330307 | KAKGK | 360376 | EESSS | 382674 | RNGMD |
| 282111 | TKSAH | 330320 | LEDNA | 360379 | EESSS | 382675 | YLLQP |
| 282141 | VVDLY | 330326 | VETFH | 360382 | QTHKK | 382678 | WEGPC |
| 282146 | TSGDR | 330330 | MRADG | 360383 | PECLF | 382679 | AQKGS |
| 282169 | YQTLL | 330338 | FTQKD | 360389 | AHSEI | 382685 | PTPSS |
| 282185 | ERNVP | 330341 | YDAPL | 360396 | GYQSV | 382692 | GSRDS |
| 282199 | IKVVD | 330342 | KFLPL | 360398 | GVSPF | 382695 | IDLQR |
| 282223 | VGYIW | 330346 | SNQII | 360401 | KTSLH | 382699 | APSAP |
| 282226 | IKVNL | 330349 | SSMDF | 360411 | ACPGP | 382700 | PKKKI |
| 282249 | RETSL | 330358 | HTGNL | 360431 | QEVKE | 382706 | PQPPK |
| 282251 | KSKNY | 330361 | RFNFF | 360437 | PAAKP | 382708 | HIAPS |
| 282272 | DENGK | 330375 | EKDKI | 360441 | TFPNV | 382709 | FFFLR |
| 282276 | KAHRT | 330376 | RNRAG | 360442 | GMNLG | 382711 | ALDKV |
| 282282 | KVHTG | 330381 | WMSNH | 360443 | EGGIG | 382713 | PVSDG |
| 282292 | TGEIQ | 330382 | ETLGA | 360444 | SEPHL | 382720 | QNAEP |
| 282308 | NVHKG | 330384 | ASRNV | 360445 | TCEAL | 382724 | SHCTW |
| 282326 | AHGHM | 330386 | PGLFP | 360455 | TFPNV | 382738 | GVNHR |
| 282333 | GRAAP | 330389 | FRLFK | 360464 | GKDDK | 382743 | DSKPY |
| 282344 | YQSRD | 330393 | CDLTV | 360471 | GNLGA | 382746 | HDLHM |
| 282356 | ILPEY | 330426 | PAAEL | 360472 | VDLSA | 382752 | DQFAA |
| 282366 | HNGLD | 330432 | NCVIS | 360473 | EADES | 382755 | WMQKC |
| 282369 | YQEDM | 330433 | GSLYI | 360475 | LTPES | 382756 | STKNT |
| 282388 | SISDD | 330442 | RTVAL | 360481 | DSLLN | 382758 | GLRTG |
| 282397 | STPPI | 330457 | ACLLF | 360483 | LEFKE | 382759 | NFCIF |
| 282406 | GPTLL | 330458 | RSKDK | 360485 | LFNRV | 382760 | HTHNE |
| 282412 | SGEKI | 330459 | MKSVQ | 360492 | LENID | 382770 | CAIPF |
| 282441 | FLTWL | 330460 | SNSQK | 360495 | QEWSY | 382771 | TASRL |
| 282466 | YIQVI | 330475 | SKTGL | 360497 | AIPIT | 382773 | HCLDL |
| 282470 | ENLLF | 330484 | AESKL | 360498 | RNFLR | 382774 | RCLLC |
| 282486 | YVTQM | 330485 | TGLLG | 360500 | QEQSD | 382775 | WPDWS |
| 282493 | HRNSS | 330488 | PDRKA | 360502 | TCLML | 382777 | CRSTC |
| 282499 | ASDLP | 330496 | CPRLA | 360515 | AFLAC | 382779 | ENEGI |
| 282507 | KVKET | 330501 | PFHSK | 360519 | ERNLL | 382780 | QRLYY |
| 282512 | VLLEQ | 330509 | DAYLE | 360525 | KIKPI | 382781 | PPVNT |
| 282516 | DGTSS | 330516 | RDRPY | 360530 | FDDVL | 382785 | LLPYP |
| 282538 | LGKDM | 330523 | EELPK | 360532 | LKSKF | 382790 | GQPNF |
| 282541 | HPEHT | 330568 | RSGST | 360538 | SIISG | 382794 | WTTSR |
| 282549 | RFQVL | 330570 | GRQIY | 360540 | EYCSK | 382795 | RLTDT |
| 282561 | DDLEI | 330572 | DIYLE | 360541 | KSIKS | 382799 | SGRGR |
| 282570 | PEKKN | 330587 | CSCCA | 360542 | YLRNN | 382804 | TDADN |
| 282572 | PPSSK | 330596 | LSPGF | 360549 | LETNV | 382807 | GAGSE |
| 282574 | GYETQ | 330606 | EEGDK | 360560 | ENSVG | 382811 | EQSHH |
| 282588 | KKMEK | 330608 | TSANL | 360561 | FWLQD | 382813 | KKLKD |
| 282605 | GVLAS | 330612 | PMGLL | 360563 | MAHGF | 382820 | GSQTV |
| 282606 | AQYID | 330625 | LCSWP | 360569 | GNAKL | 382826 | GSGCH |
| 282611 | KVDEK | 330631 | AVTLR | 360576 | TETWA | 382839 | IEEVD |
| 282635 | IIFIL | 330633 | GSLEL | 360577 | KFVGK | 382840 | DWWGN |
| 282641 | GYGTF | 330634 | IISRN | 360583 | CQMPF | 382841 | RTGGK |
| 282670 | AVYLE | 330638 | QGLAS | 360593 | PLTFG | 382842 | EALPH |
| 282673 | RCEAV | 330650 | QHTSF | 360597 | AAAQA | 382843 | SFAEA |
| 282701 | SCACR | 330658 | GYSHG | 360608 | RHRES | 382846 | CAWPL |
| 282728 | YFNAG | 330659 | VEPST | 360613 | SWRDC | 382847 | VKWMS |
| 282753 | SSSTL | 330662 | VDIAA | 360621 | ALKDE | 382849 | PGDQP |
| 282841 | KEENE | 330671 | LLLEA | 360626 | TRDNN | 382850 | KLQLL |
| 282849 | CTRKI | 330678 | QGLSM | 360635 | PRLSL | 382851 | TSASQ |
| 282878 | PNCAC | 330694 | PAPSS | 360640 | LFATT | 382853 | IKGKV |
| 282881 | ESQKQ | 330701 | RLEEL | 360642 | EPRGL | 382854 | DDWES |
| 282884 | EGIYV | 330702 | ISCKT | 360643 | TFMLL | 382861 | QEADA |
| 282892 | SLPDS | 330710 | GGCFF | 360651 | DSTFI | 382863 | EDADD |
| 282903 | SFIDP | 330714 | WGCGC | 360652 | DNQFK | 382865 | GPTRV |
| 282908 | RGCSS | 330720 | CRRTC | 360658 | KNEAN | 382866 | SNSPT |
| 282924 | KLKFM | 330730 | GRKGY | 360659 | PPALP | 382874 | ARARI |
| 282928 | NEWYV | 330732 | LLGSL | 360671 | IKKYT | 382875 | PGVLT |
| 282957 | LEHLY | 330737 | STPYK | 360672 | TIITL | 382877 | RVGLN |
| 282999 | GKKKK | 330746 | SCGFY | 360674 | ESSLP | 382883 | RSFQP |
| 283003 | IQEKI | 330753 | KENAQ | 360676 | SQSLH | 382885 | PPPVY |
| 283006 | NVDMM | 330766 | RAHLS | 360678 | AVHPR | 382886 | PPVNT |
| 283025 | LVGHT | 330768 | PMAIT | 360682 | DFDET | 382892 | LIDHF |
| 283027 | NLISS | 330770 | CCSVT | 360683 | FNSNT | 382901 | SPRKP |
| 283050 | NLKTP | 330774 | TPHPP | 360684 | TPRTP | 382903 | AQRNS |
| 283109 | SFWGE | 330785 | HQKIH | 360686 | AEITQ | 382904 | ILEKP |
| 283122 | MTGDI | 330787 | EVTWK | 360688 | LEDEL | 382908 | VQAGL |
| 283128 | RLIKA | 330805 | SSKKT | 360689 | GMVDG | 382915 | IEEVD |
| 283131 | KKLKL | 330808 | SGISP | 360690 | SRNQN | 382920 | KALLF |
| 283141 | STQTS | 330812 | LALAL | 360692 | KQRPH | 382925 | YAVVV |
| 283147 | ACGCH | 330813 | SKRGK | 360702 | SAAVD | 382942 | TLRKL |
| 283148 | RTRHS | 330836 | LRGEN | 360718 | QNCSC | 382944 | YAVVV |
| 283195 | ECGQI | 330838 | KEEAR | 360722 | HLPAS | 382945 | TPDVR |
| 283206 | SEKIM | 330842 | SRSSG | 360730 | KKASQ | 382946 | FILWP |
| 283243 | EKSDQ | 330843 | AGRPV | 360757 | NTKYS | 382949 | VKTIR |
| 283249 | LSTDC | 330862 | FFIKF | 360761 | VQPAQ | 382950 | SSDLR |
| 283254 | RENQK | 330864 | EEEEI | 360762 | RIATF | 382951 | KGKSP |
| 283256 | RESKK | 330875 | GLSSV | 360765 | PEAFK | 382956 | GLWSG |
| 283268 | RTVQS | 330877 | KGVPV | 360776 | QVNEY | 382957 | SSDLR |
| 283285 | EMETL | 330878 | GLLRV | 360777 | ICSVS | 382958 | KGKSP |
| 283290 | RHFTM | 330889 | PGHLH | 360782 | YRLFR | 382968 | DLSTN |
| 283297 | FVSNE | 330892 | RFHDL | 360793 | TKTAK | 382971 | LILSS |
| 283309 | QEFVV | 330904 | MNQEK | 360797 | DTEGS | 382973 | IYFEG |
| 283351 | IISNV | 330918 | PALQG | 360798 | EISEA | 382982 | EGEEY |
| 283357 | ELQEV | 330930 | LLQLL | 360803 | KTEPS | 382983 | DSDLE |
| 283410 | LVGVK | 330935 | KAILF | 360806 | RDQSI | 382984 | VKTIR |
| 283415 | RKKLD | 330937 | VGHDP | 360808 | VWYFS | 382985 | DSDLE |
| 283429 | DFNLL | 330940 | PQMGS | 360811 | DHAQF | 382986 | DSDLE |
| 283441 | AESED | 330945 | AKKLV | 360815 | SSVSL | 382987 | SSDLR |
| 283474 | MEAER | 330949 | FKQIS | 360816 | AQFLG | 382988 | GTLCR |
| 283478 | QSVGL | 330959 | QSYPK | 360817 | IQGMM | 382989 | RPAAF |
| 283506 | SSFTM | 330963 | TKKNY | 360821 | TLNRT | 382991 | GRSGI |
| 283507 | FPMGQ | 330965 | SSGPL | 360822 | DETQL | 382995 | SRDRA |
| 283534 | QLIDT | 330973 | ATVDG | 360825 | LNDTL | 382998 | MMTLE |
| 283550 | SQGSQ | 330994 | LIQHQ | 360828 | YKRRK | 383000 | IFVFL |
| 283627 | CCVIL | 331012 | TPYHY | 360829 | LNKPT | 383002 | DSDLE |
| 283629 | HIILK | 331020 | STLPY | 360851 | PSICD | 383006 | GSDSI |
| 283632 | KQIFF | 331039 | VGRLL | 360852 | LEAKE | 383007 | AKKIV |
| 283635 | SARYV | 331040 | TSDAK | 360858 | RSDEL | 383008 | DSDLE |
| 283645 | GMEQS | 331044 | IANNA | 360860 | LRLSI | 383015 | KMDLL |
| 283646 | EKPFC | 331047 | DALFK | 360869 | VRQGP | 383017 | IKDEI |
| 283684 | RTGDS | 331057 | PMGHM | 360872 | LALTK | 383018 | TPKKD |
| 283694 | RYTFT | 331062 | EENKL | 360874 | LNPIF | 383020 | SSNLR |
| 283713 | QLGFF | 331065 | GTTMD | 360876 | SEQLN | 383022 | DSDLE |
| 283752 | RFSSP | 331086 | KDTHV | 360878 | SRQIG | 383023 | EEKEE |
| 283871 | PAEPN | 331087 | PGAEV | 360881 | APEKQ | 383024 | LAGFY |
| 283875 | EDLFE | 331100 | GYTIW | 360886 | KAHKS | 383025 | DSDLE |
| 283882 | SKMKP | 331105 | TEAAC | 360891 | SWNGE | 383032 | VPNLQ |
| 283905 | YYFYN | 331108 | NSKLP | 360895 | MRKYQ | 383034 | SFNIL |
| 283916 | QQTGI | 331111 | EKEDS | 360899 | KYNLQ | 383035 | NSPHT |
| 283921 | NFNFS | 331127 | RERQK | 360905 | PSTPF | 383047 | APSIW |
| 283928 | RKMQQ | 331131 | LLLRP | 360910 | LQSGS | 383048 | AAFWA |
| 283930 | YTEAW | 331137 | MGNSG | 360912 | EEGIQ | 383050 | THTLP |
| 283936 | VESQM | 331152 | LSFTS | 360913 | TQESF | 383054 | TCFLR |
| 283946 | REKQP | 331167 | TCRGA | 360918 | SVPAR | 383069 | CGFNL |
| 283950 | AQPVR | 331178 | PNTLP | 360922 | VCGRC | 383075 | WRQRV |
| 283977 | PQPGF | 331186 | STEGA | 360931 | QAIHR | 383080 | FQTSA |
| 284000 | DNAGQ | 331194 | RVRMK | 360938 | VKGIY | 383081 | KMQEH |
| 284006 | VQDVL | 331199 | GHCII | 360939 | FDKEG | 383084 | PHTQT |
| 284031 | KKVDS | 331201 | LISFD | 360942 | IQSLV | 383085 | SLLDS |
| 284037 | REVSS | 331202 | LCRTP | 360944 | LPKLF | 383088 | AAFWA |
| 284049 | SSRKT | 331205 | ISVWF | 360950 | GAGPR | 383090 | SKNSQ |
| 284054 | EAPNL | 331210 | PMPGP | 360958 | DKDQL | 383092 | KKKKK |
| 284061 | IKATE | 331211 | GQKVS | 360961 | HRKST | 383093 | MLKTP |
| 284073 | TNGYH | 331214 | EHCST | 360966 | RSFLR | 383108 | HASAP |
| 284081 | RHRLV | 331218 | ETEDG | 360967 | SRKPE | 383115 | LSSAL |
| 284110 | FGWDG | 331242 | QPRSI | 360968 | KLSEC | 383126 | EESEQ |
| 284116 | HNFSA | 331258 | AREML | 360971 | DKDQL | 383129 | GGPPS |
| 284136 | RAVAT | 331267 | EGLAS | 360973 | ETFVS | 383132 | STEGA |
| 284142 | LNLEI | 331275 | ARRLR | 360985 | LSPVW | 383136 | NSKRQ |
| 284154 | QPVHL | 331276 | LCSAP | 360988 | NTITT | 383138 | YDCLL |
| 284202 | KRNEH | 331288 | RTDFS | 360991 | PGSGK | 383142 | AEALK |
| 284224 | TTPFL | 331291 | SRTLC | 360995 | PSEQL | 383143 | LEQQT |
| 284240 | DFMSL | 331294 | AMWQK | 360997 | GKEGT | 383144 | ISACT |
| 284245 | IDPEA | 331298 | MDGQR | 360998 | LRKAL | 383147 | IGAND |
| 284259 | ESKTK | 331301 | LGMAS | 360999 | LHYFK | 383154 | PQAIL |
| 284262 | INFFI | 331302 | RFSRR | 361000 | EYLQN | 383156 | EGSTE |
| 284268 | REENE | 331303 | KNDSH | 361001 | VALGI | 383158 | AGGRR |
| 284273 | TLLQE | 331305 | VVLAN | 361005 | NQNKT | 383159 | GMGTL |
| 284274 | EETSL | 331308 | NSQLM | 361007 | IQDNL | 383161 | QMRRP |
| 284287 | RGKLF | 331310 | HRKAV | 361009 | VDGDL | 383162 | QNCQI |
| 284288 | CDEHP | 331313 | LYPRA | 361010 | CSDDA | 383166 | KTRSY |
| 284292 | GPSGD | 331327 | LQLAL | 361014 | PPTAL | 383169 | GWSHC |
| 284308 | PDKVT | 331342 | KAGKM | 361021 | QITKV | 383185 | IVYWS |
| 284311 | RSVSL | 331352 | FSNAS | 361024 | DTLPN | 383186 | TRLHT |
| 284320 | KPPTL | 331358 | AEDEN | 361025 | SGGLE | 383187 | RLRAL |
| 284322 | IPGKW | 331363 | MKERR | 361027 | VEYLI | 383190 | CVCIC |
| 284368 | DAWVT | 331368 | RFSSP | 361032 | CKQPG | 383194 | AVTDV |
| 284384 | LQSAV | 331369 | SVPKR | 361036 | HCLKP | 383206 | PHWHF |
| 284395 | TRKRR | 331370 | QGEEF | 361038 | DLTGD | 383207 | KRLQS |
| 284414 | IFQDF | 331376 | LPAQL | 361042 | GTPGV | 383212 | LIENK |
| 284425 | HSDEP | 331381 | ALRKF | 361043 | QRGLR | 383213 | KLTFM |
| 284437 | LDETD | 331385 | VHALG | 361044 | GIPTK | 383214 | LGDLA |
| 284440 | LCKAA | 331397 | AGQAR | 361045 | PRPSD | 383215 | RSQLL |
| 284476 | LIKTL | 331406 | AEGRS | 361049 | SLEKN | 383216 | SRLAC |
| 284481 | SLVFQ | 331411 | SPYDF | 361054 | ISKAG | 383220 | FSTDV |
| 284483 | SMMNW | 331418 | YLNSG | 361057 | KKKEW | 383222 | LSLRS |
| 284486 | RFSLC | 331435 | MLTGG | 361064 | TSDEL | 383224 | AGITS |
| 284503 | QCQFS | 331463 | YLFYF | 361066 | DQKYC | 383225 | CVSLL |
| 284509 | KTVKL | 331465 | TVKKS | 361076 | ATKLG | 383226 | SRPAC |
| 284551 | TLAPQ | 331470 | LTGAV | 361081 | ILLQL | 383227 | VPGAT |
| 284562 | KIFRF | 331471 | FKQIS | 361083 | FGLLK | 383234 | SKERW |
| 284563 | KSNTA | 331472 | YKRIS | 361084 | AQNFV | 383235 | REVAS |
| 284601 | SVKKK | 331473 | RDFYP | 361090 | GVAVL | 383239 | RIQII |
| 284617 | YSARA | 331474 | QNGHG | 361092 | RAGLV | 383245 | FCKGI |
| 284629 | TFQRK | 331479 | DLTEL | 361095 | RPGQV | 383246 | DFGES |
| 284630 | QNHLE | 331500 | SFFPS | 361097 | LMFKT | 383247 | GFDRS |
| 284637 | FVENI | 331504 | RKRHR | 361100 | KVTML | 383249 | RQPPQ |
| 284669 | KLSKL | 331514 | HRKCF | 361101 | SPGSD | 383250 | KGQLV |
| 284674 | LPVSE | 331538 | APPSH | 361104 | CVPEH | 383251 | PLSGV |
| 284676 | LGFTW | 331540 | NHQVL | 361113 | SCLRS | 383254 | IVSYN |
| 284690 | RCTLQ | 331546 | HGGRR | 361124 | VCSFL | 383255 | DNIWL |
| 284694 | QRNAV | 331555 | LSNGS | 361125 | DKPRR | 383256 | SEAEM |
| 284719 | QPKKK | 331556 | IHKLL | 361138 | AKKID | 383263 | PQMSS |
| 284727 | ILFAM | 331557 | NIRAS | 361141 | QDPRM | 383264 | GDSPC |
| 284759 | WIQHR | 331567 | IISRN | 361151 | AVIRF | 383269 | TAQYH |
| 284770 | LYPKA | 331572 | LKKGC | 361154 | ASPGP | 383271 | HQPQG |
| 284776 | YVKRL | 331577 | VHTIK | 361158 | GKQDG | 383280 | SYGWQ |
| 284811 | NFLDC | 331581 | TVVLS | 361162 | TWGSS | 383283 | FMPDY |
| 284818 | QPNSN | 331589 | ELQEV | 361165 | GEEKK | 383284 | SSSET |
| 284856 | QAGES | 331598 | LGPLF | 361173 | GAERV | 383285 | NNLQQ |
| 284878 | DGSIV | 331600 | PYCVM | 361177 | NEYFC | 383288 | QPGPL |
| 284881 | LPINN | 331602 | HLLED | 361180 | ILDYV | 383292 | SPTAS |
| 284885 | QSFLH | 331605 | AEKSE | 361185 | TEDNS | 383293 | RLREG |
| 284894 | DDSKA | 331608 | ALSSS | 361186 | RSMVG | 383296 | NSVPV |
| 284898 | QEVRG | 331614 | RFHMS | 361189 | NKAYF | 383297 | IDFNS |
| 284920 | NWNRK | 331619 | SELNF | 361190 | WKLYH | 383298 | SGRRF |
| 284951 | RNHHG | 331620 | KPARG | 361199 | ALPQV | 383299 | RPHGL |
| 284981 | EQMQN | 331625 | SWFLG | 361200 | KQGLL | 383301 | SKPRN |
| 284984 | MAECS | 331626 | FRKTF | 361202 | PKRGR | 383303 | SYTLV |
| 284987 | LLKKC | 331636 | VATFS | 361207 | GNRKK | 383306 | ETHPL |
| 284995 | DQDDL | 331640 | HQMLK | 361213 | LRSTC | 383309 | ASLTR |
| 285013 | LYIFL | 331641 | KILGY | 361215 | SALTK | 383315 | NDIPY |
| 285018 | MYTCK | 331643 | EYHIR | 361219 | DSPVF | 383317 | ISARC |
| 285021 | PFEQL | 331647 | EIRLE | 361223 | HLLFE | 383318 | FNSRL |
| 285023 | AAGNS | 331648 | PFHKN | 361232 | TSQKV | 383319 | TTRTG |
| 285039 | FLNEV | 331649 | QLSWF | 361238 | FLNRV | 383324 | AIKER |
| 285046 | DASVL | 331664 | SIWTS | 361243 | GDPCP | 383327 | PCWPG |
| 285071 | SESRN | 331669 | IISRN | 361245 | SPWEE | 383328 | LTVSE |
| 285082 | ELVKC | 331672 | HMLRK | 361246 | KGFRE | 383329 | KRERR |
| 285083 | FEKWW | 331678 | DFLGP | 361254 | ASEKK | 383338 | ALNTV |
| 285093 | IQSTA | 331681 | SPVPP | 361266 | GPATG | 383340 | IQRRD |
| 285094 | DETGE | 331682 | NSSED | 361272 | SKSPF | 383345 | IYSHR |
| 285106 | SSADR | 331691 | KASDK | 361275 | DRSPA | 383346 | PCGLP |
| 285116 | RYVIT | 331692 | SPVQA | 361276 | IDQDL | 383347 | NKAER |
| 285141 | REKTN | 331696 | DHFSL | 361281 | EALEP | 383349 | TPETP |
| 285176 | KIVNS | 331697 | LQALI | 361286 | SSRPH | 383353 | QVRSR |
| 285199 | PESSF | 331698 | QQSNV | 361287 | RKLVF | 383358 | PGADA |
| 285208 | GGCSC | 331700 | SPDSP | 361288 | ARKGK | 383365 | TGCUG |
| 285238 | DAGLA | 331704 | SMTCS | 361298 | KKRPQ | 383366 | TVVPL |
| 285243 | SKLTY | 331710 | QRLTR | 361302 | LIRKH | 383367 | CNKSL |
| 285274 | TEEQP | 331718 | LRKEV | 361310 | KPLTH | 383371 | GALGQ |
| 285279 | GLVGC | 331719 | RDGDF | 361311 | NCVRC | 383373 | LTNWE |
| 285298 | ISSAQ | 331720 | RNRMI | 361322 | RRIYL | 383376 | RGQEF |
| 285311 | VCQKI | 331727 | GLPGK | 361325 | PVRGR | 383380 | REKLH |
| 285362 | REYFI | 331734 | CSSSK | 361327 | TSKPF | 383382 | GTDES |
| 285379 | KASFK | 331736 | PSYIL | 361328 | EILSV | 383384 | LTVSE |
| 285381 | RASFK | 331741 | DLQFP | 361336 | EAQAS | 383385 | PCWPG |
| 285383 | GLGRR | 331745 | ECGCG | 361337 | LGDGF | 383387 | AIKER |
| 285393 | YIPIL | 331746 | PQNAN | 361338 | LISAW | 383389 | HKDKS |
| 285398 | KRFRK | 331748 | HVRCC | 361345 | PPKHR | 383393 | VMSQV |
| 285402 | RKMIL | 331760 | LRPFF | 361347 | RQKQT | 383396 | SYSHI |
| 285419 | EHSFA | 331766 | VRFNI | 361359 | VQERQ | 383398 | SELYI |
| 285420 | TENCS | 331774 | VRFVL | 361366 | VVCEF | 383399 | QHESL |
| 285518 | VTIKA | 331775 | TLGRK | 361373 | PAAGP | 383402 | ASSTY |
| 285599 | HFQQQ | 331776 | IVLCM | 361377 | QHCSQ | 383407 | PDVTI |
| 285600 | NSWKN | 331784 | FGLIL | 361381 | QDSRI | 383418 | SLAPS |
| 285605 | KQEVA | 331787 | GYAVK | 361382 | TICEF | 383422 | AIKER |
| 285667 | KTNFN | 331789 | FINMY | 361383 | IASLP | 383424 | AQPPK |
| 285681 | PADGR | 331791 | DYCPR | 361390 | TICEF | 383425 | SSLMG |
| 285689 | LENGD | 331815 | KGALP | 361391 | PAVLY | 383426 | STVIL |
| 285697 | QRLIL | 331817 | RMDTS | 361392 | PQAPA | 383428 | PLDQS |
| 285718 | DDWES | 331823 | NNDIT | 361397 | RHCSQ | 383429 | RRRLQ |
| 285737 | LNSKL | 331827 | DEGSL | 361400 | TICEF | 383430 | DITLT |
| 285805 | SMASR | 331835 | MGAGP | 361404 | TICEF | 383431 | RGAKL |
| 285814 | RSSNQ | 331843 | IISRN | 361405 | QCPED | 383432 | TNRIQ |
| 285848 | HDTLG | 331845 | QSSGC | 361410 | CRRVQ | 383433 | VKSGV |
| 285850 | DPKSN | 331846 | KKETK | 361413 | VREDR | 383434 | KEPRA |
| 285871 | KPVEI | 331849 | KNKRL | 361418 | YTADY | 383435 | GRRIT |
| 285873 | QTFCM | 331857 | RGVLL | 361423 | DIVQR | 383436 | LIYSA |
| 285879 | SFSSE | 331867 | RCGST | 361433 | LEQEG | 383438 | PQSAL |
| 285894 | QTLGK | 331873 | NNENI | 361435 | KKPKE | 383442 | LAEYS |
| 285896 | NNMQQ | 331877 | KKNYV | 361446 | IPLVT | 383445 | ERKRE |
| 285900 | GATGL | 331885 | LWLLP | 361454 | RQTQI | 383447 | LLGLI |
| 285928 | PQGRR | 331894 | TFKHI | 361458 | GGSAV | 383449 | HFKTW |
| 285930 | FHEEF | 331897 | ALGRQ | 361463 | CPPEL | 383454 | ILEKH |
| 285947 | YTIVS | 331902 | CMKRT | 361465 | AVQMD | 383456 | IRKQR |
| 285949 | NGLCL | 331907 | RKQHV | 361468 | PACPL | 383457 | VRASP |
| 285968 | RISRN | 331912 | GYLYL | 361472 | PQLRG | 383458 | FSLSS |
| 285979 | CFIPV | 331915 | LSDEC | 361473 | RAIME | 383461 | THIHT |
| 286031 | IHTLG | 331921 | DRCCC | 361475 | YDGLV | 383465 | PLQFY |
| 286049 | GKSQV | 331926 | PKTNI | 361483 | WEGAV | 383474 | RSSLP |
| 286063 | KEDRN | 331927 | GQIST | 361486 | EPHPT | 383477 | QTCRD |
| 286067 | RLDAK | 331933 | DYYPR | 361508 | STAAV | 383479 | CLPAW |
| 286091 | TKEEL | 331938 | ATVQV | 361509 | KGFVG | 383485 | PLQYF |
| 286096 | SFWWS | 331939 | RELGP | 361512 | SHVPL | 383488 | HQRLY |
| 286122 | AIQIQ | 331965 | TLSLK | 361518 | AETEM | 383489 | EQPRA |
| 286143 | VSKVG | 331981 | NSTHL | 361520 | EMVYR | 383491 | KIVYL |
| 286149 | AKLLW | 331983 | EFIFV | 361522 | GNLLN | 383505 | PQTRV |
| 286175 | NPFAQ | 331987 | SAEAL | 361524 | MNRRY | 383506 | KKSSD |
| 286181 | LISQV | 332013 | KMTEF | 361536 | KVKAN | 383514 | ISIGE |
| 286186 | DALSL | 332018 | SGQRR | 361543 | VNTAF | 383515 | ISTDV |
| 286190 | KGQES | 332020 | ISIGE | 361547 | VPTVN | 383517 | RPPHS |
| 286193 | LMCGL | 332021 | QRFST | 361548 | YWQQP | 383519 | GLRGR |
| 286195 | IKRGY | 332034 | QSGWQ | 361554 | TAEEA | 383520 | KQCIS |
| 286196 | IKASS | 332036 | KEEEF | 361556 | QPDKR | 383521 | KKSSD |
| 286201 | GETAV | 332049 | SDTCF | 361557 | EISGS | 383522 | FPPGF |
| 286234 | EELEC | 332059 | GTINL | 361558 | SFALR | 383523 | MSMIK |
| 286298 | SLSSD | 332062 | REYLH | 361562 | NKQPY | 383535 | QEEMM |
| 286301 | NYQFC | 332068 | IKIFS | 361567 | GLLLG | 383536 | IPDVR |
| 286307 | VHLAQ | 332069 | AYIHM | 361568 | CREWM | 383537 | DVAHS |
| 286317 | MNERP | 332103 | GPPYL | 361569 | AIVAF | 383543 | EALRF |
| 286332 | MPRHF | 332105 | AGHPV | 361571 | EVKTN | 383544 | PDNMK |
| 286349 | LQKHF | 332110 | QHMFC | 361579 | ADSQV | 383545 | CCVIS |
| 286353 | HREGF | 332111 | PNSKF | 361581 | VLYSL | 383546 | FAGVA |
| 286355 | KSDLP | 332116 | SPVDT | 361583 | SGVKR | 383551 | LSPGS |
| 286364 | VGKAS | 332117 | KIGII | 361592 | KAPSF | 383552 | LPSLC |
| 286371 | ITARA | 332118 | LPVQV | 361596 | FCKYE | 383555 | METSP |
| 286380 | ILPGI | 332123 | ESTEI | 361597 | PGSCL | 383556 | KDWKD |
| 286398 | AHVEV | 332124 | EHSVI | 361598 | EQVQL | 383558 | AESPF |
| 286424 | AVNKK | 332130 | PSMDK | 361599 | QPPGE | 383561 | ITTGY |
| 286428 | TKNKA | 332134 | LHLCC | 361602 | ALGYQ | 383562 | NKGSK |
| 286452 | ETAAS | 332139 | DSVLA | 361603 | QGLTH | 383563 | SCSRC |
| 286479 | GSLTI | 332141 | ITRAG | 361608 | SLGGP | 383564 | PRRRR |
| 286482 | EEKGV | 332148 | RVPAW | 361612 | RRGME | 383565 | AQTRL |
| 286494 | DEDEL | 332150 | RALIL | 361616 | LAFKI | 383566 | LAGYQ |
| 286523 | KKCGR | 332151 | SQSQC | 361625 | GTKLQ | 383567 | YSQFS |
| 286544 | LVSLA | 332152 | KAYNQ | 361626 | QGGAE | 383568 | HLASE |
| 286548 | EYNLV | 332155 | AQPVG | 361628 | PENTS | 383569 | SYLGG |
| 286574 | SNYIW | 332162 | CGQAD | 361636 | MEGVQ | 383570 | FYLTP |
| 286603 | PRLES | 332163 | KSKQK | 361642 | IGDRN | 383571 | RRRWT |
| 286604 | KKKRE | 332164 | CLACS | 361646 | DHPIT | 383572 | GCCNT |
| 286614 | MQEWV | 332170 | SSPED | 361651 | ELKLK | 383573 | KKKKK |
| 286621 | KPDFH | 332171 | LVNCH | 361658 | RHMQR | 383577 | FVGSL |
| 286639 | PRFQP | 332177 | SKDDE | 361662 | CTGCL | 383578 | RLWFA |
| 286648 | FLSTL | 332184 | GTLDR | 361666 | KQVQN | 383580 | LPSQA |
| 286657 | STLER | 332185 | IGSQH | 361667 | ILLMA | 383581 | GELWK |
| 286688 | VCGKH | 332194 | KAKSK | 361668 | RWRKR | 383583 | QILLM |
| 286692 | LSRDI | 332198 | PRPVL | 361669 | ACPFF | 383585 | TAKKD |
| 286713 | HSHLG | 332204 | RDSVV | 361672 | SCPHS | 383586 | KKVTP |
| 286719 | SPGAH | 332212 | AERDA | 361681 | ELKTD | 383587 | LKVQV |
| 286732 | GLDTQ | 332215 | GLNPL | 361683 | QQQRK | 383589 | LLAMK |
| 286733 | NPSRK | 332223 | SREDL | 361699 | SINHD | 383591 | DPTVS |
| 286744 | SCQEG | 332225 | PCWQV | 361701 | SVKQQ | 383592 | PAAEA |
| 286749 | TICAQ | 332241 | LVQHW | 361705 | APPQT | 383593 | LGRDT |
| 286758 | KRKIP | 332247 | DDSVA | 361707 | RPYPI | 383594 | TLKSK |
| 286760 | GQWDG | 332256 | GDKNP | 361712 | DIPYV | 383595 | SPVQA |
| 286777 | GVEGQ | 332258 | PAAEA | 361718 | FCLMP | 383596 | GTWDF |
| 286788 | DDQND | 332274 | RCCVM | 361721 | GSVSC | 383598 | GFFST |
| 286794 | SDSTS | 332287 | QSQGY | 361725 | TAGSK | 383599 | ESPER |
| 286800 | CTTDE | 332288 | SASGS | 361726 | CMSIL | 383608 | LAGYQ |
| 286808 | STSYV | 332290 | PFTGP | 361731 | LQDSK | 383609 | AQTRL |
| 286809 | RSQYV | 332293 | WLGGY | 361740 | YPYLM | 383610 | YLRGK |
| 286824 | QYEMV | 332298 | EFRRF | 361752 | SSPAV | 383612 | SRHRR |
| 286827 | LNTEI | 332304 | ITALG | 361759 | FCLMP | 383614 | FHLSY |
| 286835 | AEAPR | 332313 | TVQFW | 361761 | VTPNF | 383615 | PAEPN |
| 286878 | EKCRE | 332325 | ALGYQ | 361763 | QNINI | 383617 | VEVKF |
| 286897 | EQERL | 332326 | LIKVG | 361765 | DVPYV | 383619 | HLASE |
| 286918 | LTGKG | 332340 | LPQAT | 361768 | SPSCS | 383620 | FPPGF |
| 286953 | APGHH | 332353 | GSSSN | 361775 | KRLIG | 383621 | VVQYH |
| 287008 | REIYL | 332359 | DIPYV | 361776 | FCLIP | 383624 | FVDIM |
| 287020 | SCGCR | 332368 | PSQRA | 361777 | EGEDD | 383626 | GRPDS |
| 287022 | EWAKK | 332369 | VTTYA | 361784 | QKIHT | 383629 | GSIPT |
| 287025 | FLKTL | 332371 | GTAQD | 361787 | ETGRF | 383631 | AVSWQ |
| 287038 | QTGEK | 332379 | SCALL | 361790 | FRNKV | 383632 | EEWVL |
| 287042 | NDSLR | 332389 | YYLPD | 361794 | KMLPS | 383634 | EVSYA |
| 287078 | PRSKL | 332407 | VILSL | 361795 | PGACS | 383635 | LKMLS |
| 287097 | MELWL | 332413 | EESPK | 361800 | AEVAA | 383639 | LCKTR |
| 287139 | ECGCL | 332415 | DTELE | 361803 | PQMWK | 383641 | WKLWR |
| 287143 | FVCSF | 332419 | KQSQC | 361811 | SRVYK | 383643 | KLNTQ |
| 287152 | CLGSN | 332424 | SEIRR | 361813 | FCLMP | 383644 | PAAGI |
| 287156 | VDRPS | 332433 | ITVLQ | 361818 | NEFYA | 383646 | EQRGR |
| 287169 | YEISV | 332437 | KSRLP | 361833 | DVEPN | 383652 | PAAGI |
| 287196 | QVYTN | 332443 | RWQQW | 361834 | SIKGP | 383653 | DNDIM |
| 287202 | ANRPY | 332444 | STGAS | 361845 | TMKQH | 383655 | SPSYT |
| 287239 | SYMRR | 332445 | KKEEC | 361850 | NGLAL | 383656 | SFLMS |
| 287254 | VLDNL | 332448 | LDPDT | 361852 | FTSPI | 383657 | DDTAL |
| 287272 | RQNGL | 332449 | SHTFK | 361855 | NPIST | 383662 | KDVIL |
| 287275 | PKKYC | 332452 | VWPYK | 361857 | CVGSS | 383668 | QGKSM |
| 287295 | NIHED | 332455 | GTFNF | 361859 | GVSGE | 383670 | GTFNF |
| 287322 | EKKGL | 332468 | DLPDP | 361865 | IPFLG | 383671 | SQDGA |
| 287364 | LSQGS | 332473 | KRRRV | 361867 | NPLFT | 383672 | TDTSV |
| 287380 | HLLAA | 332482 | LASCL | 361868 | SILGF | 383673 | AVLSD |
| 287387 | GSKNC | 332488 | TQAPL | 361871 | RCPQK | 383674 | IFQDF |
| 287394 | FSCSR | 332495 | LCNHD | 361882 | RSPPA | 383675 | RPAKV |
| 287396 | NLFKF | 332498 | RSGME | 361892 | RQQNF | 383676 | ENCCL |
| 287437 | HRHSE | 332500 | FIIRN | 361894 | LKRTD | 383678 | HSTEV |
| 287450 | HCNLF | 332502 | DMPRT | 361895 | LASIL | 383680 | ISVGL |
| 287461 | RGNAH | 332504 | LSWDN | 361900 | KQNLH | 383681 | DKEGA |
| 287474 | LGSCL | 332511 | KLPLK | 361914 | QQVAP | 383682 | EECIR |
| 287482 | QLPNS | 332513 | EDEDS | 361915 | ACGCH | 383683 | RARAP |
| 287490 | GYEHP | 332516 | QTNEL | 361917 | VLTKL | 383684 | SAVHL |
| 287497 | GAEPQ | 332528 | VYVLS | 361918 | ESHTI | 383685 | NSFRY |
| 287538 | NEWYV | 332529 | KVTVH | 361920 | KTAMA | 383690 | IISDF |
| 287543 | ELKCE | 332530 | LKNYI | 361921 | SSICF | 383694 | TFQRA |
| 287546 | PVTED | 332536 | SISGA | 361923 | KPYLS | 383696 | EDRRQ |
| 287585 | HSQGP | 332549 | IESDV | 361926 | PPDEL | 383706 | LVFVF |
| 287590 | KLQVL | 332560 | LTICP | 361927 | QSNLA | 383722 | KSREP |
| 287598 | ALLFQ | 332565 | FDFYL | 361929 | PRDEL | 383723 | NCLPP |
| 287600 | RLFYV | 332579 | HPITF | 361932 | KRQHL | 383724 | PRPRF |
| 287641 | TFTSC | 332591 | EATNV | 361935 | CDMQK | 383726 | SRYQK |
| 287647 | FPFPP | 332592 | VRTWS | 361940 | QVIQF | 383727 | GDTLW |
| 287652 | RLYSL | 332595 | EKLQT | 361942 | CGERS | 383729 | NKHWY |
| 287653 | LPLQS | 332596 | TFLLC | 361943 | EIGAF | 383730 | KDAFS |
| 287660 | ENFLN | 332600 | LANCT | 361944 | TLHGG | 383732 | LLPER |
| 287667 | KTRRT | 332601 | KKIMF | 361949 | AAATS | 383733 | RSHIG |
| 287675 | IRKPS | 332602 | SGQRR | 361952 | RWKSI | 383736 | MKKHQ |
| 287706 | SSPGS | 332603 | QAVVC | 361957 | HTVGP | 383738 | SHHAQ |
| 287709 | RIVTS | 332604 | SQTAY | 361965 | AGQNL | 383739 | KLALE |
| 287713 | INASG | 332613 | DPYPG | 361970 | LVLNS | 383743 | FTGEY |
| 287727 | LENIV | 332615 | TRSSP | 361982 | RGAGQ | 383750 | PTPPP |
| 287748 | DGCKL | 332624 | YAPEL | 361987 | KEKRG | 383754 | WLPFL |
| 287766 | KEAYI | 332626 | DCGLL | 361990 | DWQHL | 383756 | ILLIK |
| 287773 | EPSPP | 332643 | SVSED | 361993 | ESLSD | 383757 | LICTW |
| 287777 | CLTKM | 332646 | TLKAE | 361998 | RFLKK | 383759 | TGMSH |
| 287814 | DIVQP | 332655 | VVDLT | 361999 | RMWWV | 383760 | RTQPG |
| 287820 | YKDLY | 332656 | LSEVA | 362001 | DSPSE | 383762 | VAKQI |
| 287859 | HYFSD | 332659 | LHDAL | 362013 | GDAEL | 383763 | GFCGG |
| 287878 | ETETE | 332668 | GPTIL | 362014 | PPFDL | 383765 | PTWTT |
| 287899 | QRDSR | 332670 | ELKSM | 362021 | KVKVS | 383766 | ALGSG |
| 287907 | FSRQH | 332674 | CLDKC | 362026 | LLFTR | 383767 | ALPLS |
| 287908 | RVTVM | 332679 | SFLPR | 362028 | HKAGL | 383768 | AVATT |
| 287916 | VSHTT | 332690 | SGYYY | 362029 | TRLKT | 383769 | PASAS |
| 287934 | GETTV | 332695 | LKSPA | 362033 | IYTHT | 383770 | LLLFI |
| 287936 | TKKTA | 332698 | DPTVS | 362034 | DSYKK | 383771 | TGVSH |
| 287957 | VANHL | 332706 | EGEED | 362036 | EATET | 383772 | ANIVS |
| 287968 | VIFPQ | 332713 | PSTHT | 362041 | KKEKK | 383776 | DGPVP |
| 287996 | VLHKV | 332721 | FTLQS | 362044 | KACGQ | 383779 | DYRHK |
| 288014 | DHCLG | 332722 | RVKQL | 362054 | VLWRS | 383783 | ISACT |
| 288022 | MKVND | 332723 | IKKKK | 362056 | AEAAG | 383787 | PQPSE |
| 288025 | KKPRC | 332724 | QQFAF | 362057 | NKENF | 383788 | PQPPE |
| 288040 | WGPGS | 332727 | IPKKK | 362058 | GEPRP | 383790 | AQEDP |
| 288048 | PFPHF | 332729 | FPPGF | 362063 | STGAP | 383793 | EDTEM |
| 288050 | DLHGK | 332737 | SEAEC | 362066 | TSCMS | 383796 | EDTEM |
| 288063 | AAAQP | 332738 | GSGCH | 362070 | KPTKN | 383797 | AQRDK |
| 288065 | FKNTE | 332740 | AWPPA | 362071 | VHLLT | 383798 | AQEDP |
| 288071 | EKIAN | 332744 | ISWAT | 362073 | KPDTF | 383799 | SFTED |
| 288087 | SPFEA | 332750 | ESISV | 362082 | TAIHL | 383803 | SAGGA |
| 288098 | EGLLP | 332756 | ESNVL | 362085 | SDASP | 383811 | SVCFL |
| 288111 | YTSKF | 332766 | DCLAA | 362089 | QCIDG | 383816 | YRHPP |
| 288135 | VHDDV | 332769 | SEDVI | 362092 | PRNAI | 383822 | PCLLK |
| 288139 | CITTL | 332771 | PPAPK | 362094 | LRPGQ | 383825 | SYFLF |
| 288167 | GCCSL | 332772 | LSERE | 362095 | RDICE | 383831 | SRLTA |
| 288177 | TPFYW | 332773 | AHSEQ | 362100 | PQTFS | 383832 | RTHTG |
| 288197 | MLFSR | 332777 | HQGHQ | 362103 | PGSVQ | 383835 | YRVHL |
| 288207 | LIGRS | 332788 | RSTDV | 362105 | SRRKR | 383836 | LPGAI |
| 288228 | PETPM | 332790 | PGKNK | 362107 | SQAGP | 383837 | KSKSL |
| 288235 | YVTKI | 332791 | VRRCN | 362110 | RQGLL | 383838 | IPLNL |
| 288266 | RESEA | 332805 | PFALY | 362111 | QYEIV | 383845 | LLPHP |
| 288309 | NESKV | 332806 | PGQAN | 362114 | LCNPL | 383851 | QKELA |
| 288350 | RKIII | 332809 | QEEVS | 362116 | FATAA | 383852 | VDGCR |
| 288390 | FPRQS | 332812 | SSTSS | 362121 | FQNNF | 383853 | ALAQG |
| 288400 | TIKLS | 332816 | HPPAE | 362122 | MLGRV | 383855 | GLPKC |
| 288422 | MPRYT | 332818 | EQVLM | 362123 | EKEEL | 383856 | TAQSS |
| 288425 | LRRWW | 332823 | LGEKV | 362125 | KDIVL | 383857 | ECPAS |
| 288462 | SSGAE | 332827 | DKLLL | 362127 | SSFSK | 383858 | TAKKD |
| 288490 | LETAV | 332834 | PDSWM | 362131 | FKSAD | 383859 | PVFKT |
| 288532 | SGFKL | 332838 | KGLML | 362134 | PVAGL | 383864 | LEGSL |
| 288548 | YIQSG | 332840 | AAADN | 362135 | HASYL | 383869 | KGNLI |
| 288561 | PRKSQ | 332845 | RRFSV | 362136 | EQWLM | 383870 | EDKDD |
| 288602 | AFPVH | 332848 | PPVLP | 362139 | QGVQV | 383872 | LDQLQ |
| 288607 | VCQVW | 332855 | LLGTV | 362144 | IGEKD | 383873 | GCWLQ |
| 288634 | TEEEL | 332861 | RVHVQ | 362153 | FRQKQ | 383876 | FEMES |
| 288666 | KQSSG | 332874 | AQKAK | 362160 | GVQSR | 383878 | SHHAQ |
| 288680 | RFLEV | 332875 | FEFRA | 362170 | DSIIQ | | |
| 288699 | SSGIW | 332879 | EHCHT | 362171 | KKYRK | | |
| 288710 | RVPTK | 332886 | CSSFD | 362172 | LLLLP | | |

[0181] In some embodiments, the PDZbm used in the anchoring domain of the CAR of the present disclosure may be ESIV (SEQ ID NO: 1), or HPMRCMNYITKLYSEAKTKRKENVQHSKLEEKHIQVPESIV (SEQ ID NO: 3), or a functional variant thereof.

[0182] In some embodiments, the PDZbm comprises the amino acid sequence set forth in SEQ ID NO: 1 or a variant thereof having at least 50, at least 55, at least 60, at least 65, at least 70, at least 75, at least 80, at least 85, at least 90, at least 95, at least 96, at least 97, at least 98 or at least 99%, sequence identity with SEQ ID NO: 1. In certain embodiments, the nucleotide sequence that encodes the PDZbm comprises the nucleotide sequence that encodes the amino acid sequence of SEQ ID NO: 1, or a variant thereof having at least 50, at least 55, at least 60, at least 65, at least 70, at least 75, at least 80, at least 85, at least 90, at least 95, at least 96, at least 97, at least 98 or at least 99%, sequence identity with SEQ ID NO: 1. In certain embodiments, the nucleotide sequence that encodes the PDZbm comprises the nucleotide sequence set forth in SEQ ID NO: 2, or a nucleotide sequence having at least 50, at least 55, at least 60, at least 65, at least 70, at least 75, at least 80, at least 85, at least 90, at least 95, at least 96, at least 97, at least 98 or at least 99%, sequence identity with SEQ ID NO: 2. In certain embodiments, the PDZbm comprises the amino acid sequence set forth in SEQ ID NO: 1. In certain embodiments, the nucleotide sequence that encodes the PDZbm comprises the nucleotide sequence set forth in SEQ ID NO: 2.

[0183] In some embodiments, the PDZbm comprises the amino acid sequence set forth in SEQ ID NO: 3 or a variant thereof having at least 50, at least 55, at least 60, at least 65, at least 70, at least 75, at least 80, at least 85, at least 90, at least 95, at least 96, at least 97, at least 98 or at least 99%, sequence identity with SEQ ID NO: 3. In certain embodiments, the nucleotide sequence that encodes the PDZbm comprises the nucleotide sequence that encodes the amino acid sequence of SEQ ID NO: 3, or a variant thereof having at least 50, at least 55, at least 60, at least 65, at least 70, at least 75, at least 80, at least 85, at least 90, at least 95, at least 96, at least 97, at least 98 or at least 99%, sequence identity with SEQ ID NO: 3. In certain embodiments, the nucleotide sequence that encodes the PDZbm comprises the nucleotide sequence set forth in SEQ ID NO: 4, or a nucleotide sequence having at least 50, at least 55, at least 60, at least 65, at least 70, at least 75, at least 80, at least 85, at least 90, at least 95, at least 96, at least 97, at least 98 or at least 99%, sequence identity with SEQ ID NO: 4. In certain embodiments, the PDZbm comprises the amino acid sequence set forth in SEQ ID NO: 3. In certain embodiments, the nucleotide sequence that encodes the PDZbm comprises the nucleotide sequence set forth in SEQ ID NO: 4.

### Additional Genes

[0184] In addition to the CAR construct, the CAR may further comprise at least one additional gene that encodes an additional peptide. Examples of additional genes can include a transduced host cell selection marker, an in vivo tracking marker, cellular marker, epitope tag, a cytokine, a suicide gene, safety switch, or some other functional gene. In certain embodiments, the functional additional gene can induce the expression of another molecule. In certain embodiments, the functional additional gene can increase the safety of the CAR. For example, the CAR construct may comprise an additional gene which is truncated CD19 (tCD19). The tCD19 can be used as a tag. Expression of tCD19 may also help determine transduction efficiency.

[0185] Other examples of additional genes include genes that encode polypeptides with a biological function; examples include, but are not limited to, cytokines, chimeric cytokine receptors, dominant negative receptors, safety switches (CD20, truncated EGFR or HER2, inducible caspase 9 molecules). As another example, the CAR construct may comprise an additional gene which is a synNotch receptor. Once activated, the synNotch receptor can induce the expression of a target gene (e.g., a second CAR and/or bispecific molecule).

[0186] In some embodiments, the CAR may comprise one or more additional nucleotide sequences encoding one or more additional polypeptide sequences. As a non-limiting example, the one or more additional polypeptide sequences may be selected from one or more cellular markers, epitope tags, cytokines, safety switches, dimerization moieties, or degradation moieties.

[0187] In certain embodiments, the CAR comprises at least one additional gene (i.e., a second gene). In certain embodiments, the CAR comprises one second gene. In other embodiments, the CAR comprises two additional genes (i.e., a third gene). In yet another embodiment, the CAR comprises three additional genes (i.e., a fourth gene). In certain embodiments, the additional genes are separated from each other and the CAR construct. For example, they may be separated by 2A sequences and/or an internal ribosomal entry sites (IRES). In certain examples, the CAR can be at any position of the polynucleotide chain (for example construct A: CAR, second gene, third gene, fourth gene; construct B: second gene, CAR, third gene, fourth gene; etc.)

[0188] Non-limiting examples of classes of additional genes that can be used to increase the effector function of CAR containing host cells, include (a) secretable cytokines (e.g., but not limited to, IL-7, IL-12, IL-15, IL-18), (b) membrane bound cytokines (e.g., but not limited to, IL-15), (c) chimeric cytokine receptors (e.g., but not limited to, IL-2/IL-7, IL-4/IL-7), (d) constitutive active cytokine receptors (e.g., but not limited to, C7R), (e) dominant negative receptors (DNR; e.g., but not limited to TGFRII DNR), (f) ligands of costimulatory molecules (e.g., but not limited to, CD80, 4-1BBL), (g) nuclear factor of activated T-cells (NFATs) (e.g., NFATc1, NFATc2, NFATc3, NFATc4, and NFAT5), (h) antibodies, including fragments thereof and bispecific antibodies (e.g., but not limited to, bispecific T-cell engagers (BiTEs)), or (i) a second CAR.

[0189] In some embodiments, the additional gene sequence may be derived from tCD19. In some embodiments, the tCD19 sequence comprises the amino acid sequence set forth in SEQ ID NO: 77 or a variant thereof having at least 50, at least 55, at least 60, at least 65, at least 70, at least 75, at least 80, at least 85, at least 90, at least 95, at least 96, at least 97, at least 98 or at least 99%, sequence identity with SEQ ID NO: 77. In certain embodiments, the nucleotide sequence encoding the tCD19 sequence comprises the nucleotide sequence that encodes the amino acid sequence of SEQ ID NO: 77, or a variant thereof having at least 50, at least 55, at least 60, at least 65, at least 70, at least 75, at least 80, at least 85, at least 90, at least 95, at least 96, at least 97, at least 98 or at least 99%, sequence identity with SEQ ID NO: 77. In certain embodiments, the nucleotide sequence encoding the tCD19 sequence comprises the sequence set forth in SEQ ID NO: 78 or 79, or a nucleotide sequence having at least 50, at least 55, at least 60, at least 65, at least 70, at least 75, at least 80, at least 85, at least 90, at least 95, at least 96, at least 97, at least 98 or at least 99%, sequence identity with SEQ ID NO: 78 or 79. In certain embodiments, the tCD19 sequence comprises the amino acid sequence of SEQ ID NO: 33. In certain embodiments, the nucleotide sequence encoding the tCD19 sequence comprises the nucleotide sequence set forth in SEQ ID NO: 78 or 79.

[0190] In certain embodiments, the additional gene may be regulated by an NFAT dependent-promoter. Activation of the T-cell or other lymphocyte leads to activation of the transcription factor NFAT resulting in the induction of the expression of the protein encoded by the gene linked with the NFAT dependent promoter. One or more members of the NFAT family (i.e., NFATc1, NFATc2, NFATc3, NFATc4, and NFAT5) is expressed in most cells of the immune system. NFAT-dependent promoters and enhancers tend to have three to five NFAT binding sites.

[0191] In certain embodiments, the functional additional gene can be a suicide gene. A suicide gene is a recombinant gene that will cause the host cell that the gene is expressed in to undergo programmed cell death or antibody mediated clearance at a desired time. Suicide genes can function to increase the safety of the CAR. In another embodiment, the additional gene is an inducible suicide gene. Non-limiting examples of suicide genes include i) molecules that are expressed on the cell surface and can be targeted with a clinical grade monoclonal antibody including CD20, EGFR or a fragment thereof, HER2 or a fragment thereof, and ii) inducible suicide genes (e.g., but not limited to inducible caspase 9 (see Straathof et al. (2005) Blood. 105 (11): 4247-4254; US Publ. No. 2011/0286980, each of which are incorporated herein by reference in their entirety for all purposes)).

[0192] In certain aspects, CARs of the present disclosure may be regulated by a safety switch. As used herein, the term “safety switch” refers to any mechanism that is capable of removing or inhibiting the effect of a CAR from a system (e.g., a culture or a subject). Safety switches can function to increase the safety of the CAR.

[0193] The function of the safety switch may be inducible. Non-limiting examples of safety switches include (a) molecules that are expressed on the cell surface and can be targeted with a clinical grade monoclonal antibody including CD20, EGFR or a fragment thereof, HER2 or a fragment thereof, and (b) inducible suicide genes (e.g., but not limited to herpes simplex virus thymidine kinase (HSV-TK) and inducible caspase 9 (see Straathof et al. (2005) Blood. 105 (11): 4247-4254; US Publ. No. 2011/0286980, each of which are incorporated herein by reference in their entirety for all purposes).

[0194] In some embodiments, the safety switch is a CD20 polypeptide. Expression of human CD20 on the cell surface presents an attractive strategy for a safety switch. The inventors and others have shown that cells that express CD20 can be rapidly eliminated with the FDA approved monoclonal antibody rituximab through complement-mediated cytotoxicity and antibody-dependent cell-mediated cytotoxicity (see e.g., Griffioen, M., et al. Haematologica 94, 1316-1320 (2009), which is incorporated herein by reference in its entirety for all purposes). Rituximab is an anti-CD20 monoclonal antibody that has been FDA approved for Chronic Lymphocytic Leukemia (CLL) and Non-Hodgkin's Lymphoma (NHL), among others (Storz, U. MAbs 6, 820-837 (2014), which is incorporated herein by reference in its entirety for all purposes). The CD20 safety switch is non-immunogenic and can function as a reporter/selection marker in addition to a safety switch (Bonifant, C. L., et al. Mol Ther 24, 1615-1626 (2016); van Loenen, M. M., et al. Gene Ther 20, 861-867 (2013); each of which is incorporated herein by reference in its entirety for all purposes).

[0195] In some embodiments, the polynucleotide sequence(s) encoding the CARs of the present disclosure may be expressed in an inducible fashion, for example, as may be achieved with an inducible promoter, an inducible expression system, an artificial signaling circuits, and/or drug-induced splicing.

[0196] In some embodiments, the polynucleotide sequence(s) encoding the CARs of the present disclosure may be expressed in an inducible fashion, such as that which may be achieved with i) an inducible promoter, for example, but not limited to promotors that may be activated by T cell activation (e.g. NFAT, Nur66, IFNg) or hypoxia; ii) an inducible expression system, for example, but not limited to doxycycline- or tamoxifen-inducible expression system; iii) artificial signaling circuits including, but not limited to, SynNotch, and/or iv) drug-induced splicing. By way of a non-limiting example, drug-induced splicing methods and/or compositions useful in the practice of the present disclosure may be based those described in, for example, Monteys et al., 2021 [39], the contents of which is incorporated herein by reference in its entirety for all purposes.

[0197] In some embodiments, the polynucleotide sequence(s) encoding the CARs disclosed herein may be expressed as a ‘split molecule’ in which for example, transmembrane and intracellular signaling regions, or any other domains or regions of the CAR, may be assembled only in the presence of a heterodimerizing small molecule (e.g., small organic molecule, nucleic acid, polypeptide, or a fragment, isoform, variant, analog, or derivative thereof), as described in, for example, Wu et al., 2015 [40], the contents of which is incorporated herein by reference in its entirety for all purposes.

[0198] In some embodiments, the polynucleotide sequence(s) encoding the CARs herein may further encode a moiety so that the stability of CAR may be regulated with a small molecule, including but not limited to, the “SWIFF” technology or an immunomodulatory drug (IMiD)-inducible degron as described, for example, in Juillerat et al., 2019 [41], Carbonneau et al., 2021 [42], and Jan et al., 2021 [43], the contents of each of which is incorporated herein by reference in its entirety for all purposes.

[0199] In some embodiments, the sequence encoding an additional gene is operably linked to the sequence encoding CAR via a sequence encoding a self-cleaving peptide and/or an Internal Ribosome Entry Site (IRES) as disclosed herein.

[0200] Non-limiting examples of self-cleaving peptide sequences includes Thoseaasigna virus 2A (T2A; AEGRGSLLTCGDVEENPGP, SEQ ID NO: 66, EGRGSLLTCGDVEENPGP, SEQ ID NO: 64, or GSGEGRGSLLTCGDVEENPGP, SEQ ID NO: 67); the foot and mouth disease virus (FMDV) 2A sequence (F2A; GSGSRVTELLYRMKRAETYCPRPLLAIHPTEARHKQKIVAPVKQLLNFDLLKLAGDV ESNPGP, SEQ ID NO: 68), Sponge (Amphimedon queenslandica) 2A sequence (LLCFLLLLLSGDVELNPGP, SEQ ID NO: 69; or HHFMFLLLLLAGDIELNPGP, SEQ ID NO: 70); acorn worm 2A sequence (Saccoglossus kowalevskii) (WFLVLLSFILSGDIEVNPGP, SEQ ID NO: 71); amphioxus (Branchiostoma floridae) 2A sequence (KNCAMYMLLLSGDVETNPGP, SEQ ID NO: 72; or MVISQLMLKLAGDVEENPGP, SEQ ID NO: 73); porcine teschovirus-1 2A sequence (P2A; GSGATNFSLLKQAGDVEENPGP, SEQ ID NO: 74); and equine rhinitis A virus 2A sequence (E2A; GSGQCTNYALLKLAGDVESNPGP, SEQ ID NO: 75). In some embodiments, the separation sequence is a naturally occurring or synthetic sequence. In certain embodiments, the separation sequence includes the 2A consensus sequence D-X-E-X-NPGP (SEQ ID NO: 76), in which X is any amino acid residue.

[0201] Alternatively, an Internal Ribosome Entry Site (IRES) may be used to link the CAR and the additional gene. IRES is an RNA element that allows for translation initiation in a cap-independent manner. IRES can link two coding sequences in one bicistronic vector and allow the translation of both proteins in cells.

[0202] In some embodiments, the self-cleaving 2A peptide is a T2A peptide and comprises the amino acid sequence set forth in SEQ ID NO: 64. In some embodiments, the sequence encoding the T2A peptide comprises the nucleotide sequence SEQ ID NO: 65.

[0203] In certain embodiments, the host cells can be genetically modified to express not only CARs as disclosed herein but to also express fusion protein with signaling activity (e.g., costimulation, T-cell activation). These fusion proteins can improve host cell activation and/or responsiveness. In certain embodiments, the fusion protein can enhance the host cell's response to the target antigen. In certain embodiments, the fusion protein can impart resistance to suppression signals.

[0204] In certain embodiments, fusion proteins can comprise portions of CD4, CD8α, CD28, portions of a T-cell receptor, or an antigen-binding moiety (e.g., scFv) linked to a MyD88, CD40, and/or other signaling molecules.

[0205] In certain embodiments, the fusion protein comprises an extracellular target-binding domain (as disclosed above), a transmembrane domain (as described above) and a cytoplasmic domain, wherein the cytoplasmic domain comprises at least one co-stimulatory protein (as described above). In certain embodiments, the co-stimulatory fusion protein does not comprise a lymphocyte activation domain (e.g., CD3ζ). In certain embodiments, the at least one co-stimulatory protein can be a MyD88 polypeptide or functional fragment thereof, and/or a CD40 cytoplasmic polypeptide region or a functional fragment thereof.

[0206] In certain embodiments, the fusion protein comprises an extracellular domain (such as, but not limited to CD19, CD34), a transmembrane domain (as described above) and a cytoplasmic domain, wherein the cytoplasmic domain comprises at least one co-stimulatory protein (as described above). In certain embodiments, the fusion protein does not comprise a lymphocyte activation domain (e.g., CD3ζ). In certain embodiments, the at least one portion of the fusion protein can be a MyD88 polypeptide or functional fragment thereof, and/or a CD40 cytoplasmic polypeptide region or a functional fragment thereof.

[0207] Non-limiting examples of fusion proteins include, but are not limited to, the constructs in the publication of WO2019222579 and WO2016073875, which are incorporated herein by reference in its entirety for all purposes.

[0208] In certain embodiments, the fusion proteins are introduced into the host cell on a separate vector from the CAR. In certain embodiments, the fusion proteins are introduced into the host cell on the same vector as the CAR. In certain embodiments, the fusion proteins are introduced into the host cell on the same vector as the CAR but separated by a separation sequence such as 2A.

### Non-Limiting Examples of CARS

[0209] In certain embodiments, a PDZ CAR of the disclosure comprises an extracellular binding domain comprising the amino acid sequence of SEQ ID NO: 82, or a variant thereof having at least 50, at least 55, at least 60, at least 65, at least 70, at least 75, at least 80, at least 85, at least 90, at least 95, at least 96, at least 97, at least 98 or at least 99%, sequence identity with SEQ ID NO: 82. In certain embodiments, the extracellular binding domain of a PDZ CAR of the disclosure is encoded by a nucleotide sequence that encodes the amino acid sequence of SEQ ID NO: 82, or a variant thereof having at least 50, at least 55, at least 60, at least 65, at least 70, at least 75, at least 80, at least 85, at least 90, at least 95, at least 96, at least 97, at least 98 or at least 99%, sequence identity with SEQ ID NO: 82. In certain embodiments, the nucleotide sequence that encodes the extracellular binding domain of a PDZ CAR of the disclosure comprises the nucleotide sequence set forth in SEQ ID NO: 83, or a nucleotide sequence having at least 50, at least 55, at least 60, at least 65, at least 70, at least 75, at least 80, at least 85, at least 90, at least 95, at least 96, at least 97, at least 98 or at least 99%, sequence identity with SEQ ID NO: 83. In certain embodiments, a PDZ CAR of the disclosure comprises an extracellular binding domain comprising the amino acid sequence set forth in SEQ ID NO: 82. In certain embodiments, the nucleotide sequence that encodes the extracellular binding domain of a PDZ CAR of the disclosure comprises the nucleotide sequence set forth in SEQ ID NO: 82.

[0210] In certain embodiments, a PDZ CAR of the disclosure comprises a cytoplasmic domain comprising the amino acid sequence of SEQ ID NO: 86, or a variant thereof having at least 50, at least 55, at least 60, at least 65, at least 70, at least 75, at least 80, at least 85, at least 90, at least 95, at least 96, at least 97, at least 98 or at least 99%, sequence identity with SEQ ID NO: 86. In certain embodiments, the cytoplasmic domain of a PDZ CAR of the disclosure is encoded by a nucleotide sequence that encodes the amino acid sequence of SEQ ID NO: 86, or a variant thereof having at least 50, at least 55, at least 60, at least 65, at least 70, at least 75, at least 80, at least 85, at least 90, at least 95, at least 96, at least 97, at least 98 or at least 99%, sequence identity with SEQ ID NO: 86. In certain embodiments, the nucleotide sequence that encodes the cytoplasmic domain of a PDZ CAR of the disclosure comprises the nucleotide sequence set forth in SEQ ID NO: 87, or a nucleotide sequence having at least 50, at least 55, at least 60, at least 65, at least 70, at least 75, at least 80, at least 85, at least 90, at least 95, at least 96, at least 97, at least 98 or at least 99%, sequence identity with SEQ ID NO: 87. In certain embodiments, a PDZ CAR of the disclosure comprises a cytoplasmic domain comprising the amino acid sequence set forth in SEQ ID NO: 86. In certain embodiments, the nucleotide sequence that encodes the cytoplasmic domain of a PDZ CAR of the disclosure comprises the nucleotide sequence set forth in SEQ ID NO: 87.

[0211] In certain embodiments, a PDZ CAR of the disclosure comprises the amino acid sequence of SEQ ID NO: 92, or a variant thereof having at least 50, at least 55, at least 60, at least 65, at least 70, at least 75, at least 80, at least 85, at least 90, at least 95, at least 96, at least 97, at least 98 or at least 99%, sequence identity with SEQ ID NO: 92. In certain embodiments, a PDZ CAR of the disclosure is encoded by a nucleotide sequence that encodes the amino acid sequence of SEQ ID NO: 92, or a variant thereof having at least 50, at least 55, at least 60, at least 65, at least 70, at least 75, at least 80, at least 85, at least 90, at least 95, at least 96, at least 97, at least 98 or at least 99%, sequence identity with SEQ ID NO: 92. In certain embodiments, the nucleotide sequence that encodes a PDZ CAR of the disclosure comprises the nucleotide sequence set forth in SEQ ID NO: 93, or a nucleotide sequence having at least 50, at least 55, at least 60, at least 65, at least 70, at least 75, at least 80, at least 85, at least 90, at least 95, at least 96, at least 97, at least 98 or at least 99%, sequence identity with SEQ ID NO: 93. In certain embodiments, a PDZ CAR of the disclosure comprises an amino acid sequence set forth in SEQ ID NO: 92. In certain embodiments, the nucleotide sequence that encodes a PDZ CAR of the disclosure comprises the nucleotide sequence set forth in SEQ ID NO: 93.

[0212] In certain embodiments, a PDZ CAR of the disclosure comprises an extracellular binding domain comprising the amino acid sequence of SEQ ID NO: 123, or a variant thereof having at least 50, at least 55, at least 60, at least 65, at least 70, at least 75, at least 80, at least 85, at least 90, at least 95, at least 96, at least 97, at least 98 or at least 99%, sequence identity with SEQ ID NO: 123. In certain embodiments, the extracellular binding domain of a PDZ CAR of the disclosure is encoded by a nucleotide sequence that encodes the amino acid sequence of SEQ ID NO: 123, or a variant thereof having at least 50, at least 55, at least 60, at least 65, at least 70, at least 75, at least 80, at least 85, at least 90, at least 95, at least 96, at least 97, at least 98 or at least 99%, sequence identity with SEQ ID NO: 123. In certain embodiments, the nucleotide sequence that encodes the extracellular binding domain of a PDZ CAR of the disclosure comprises the nucleotide sequence set forth in SEQ ID NO: 124, or a nucleotide sequence having at least 50, at least 55, at least 60, at least 65, at least 70, at least 75, at least 80, at least 85, at least 90, at least 95, at least 96, at least 97, at least 98 or at least 99%, sequence identity with SEQ ID NO: 124. In certain embodiments, a PDZ CAR of the disclosure comprises an extracellular binding domain comprising the amino acid sequence set forth in SEQ ID NO: 123. In certain embodiments, the nucleotide sequence that encodes the extracellular binding domain of a PDZ CAR of the disclosure comprises the nucleotide sequence set forth in SEQ ID NO: 124.

[0213] In certain embodiments, a PDZ CAR of the disclosure comprises a cytoplasmic domain comprising the amino acid sequence of SEQ ID NO: 125, or a variant thereof having at least 50, at least 55, at least 60, at least 65, at least 70, at least 75, at least 80, at least 85, at least 90, at least 95, at least 96, at least 97, at least 98 or at least 99%, sequence identity with SEQ ID NO: 125. In certain embodiments, the cytoplasmic domain of a PDZ CAR of the disclosure is encoded by a nucleotide sequence that encodes the amino acid sequence of SEQ ID NO: 125, or a variant thereof having at least 50, at least 55, at least 60, at least 65, at least 70, at least 75, at least 80, at least 85, at least 90, at least 95, at least 96, at least 97, at least 98 or at least 99%, sequence identity with SEQ ID NO: 125. In certain embodiments, the nucleotide sequence that encodes the cytoplasmic domain of a PDZ CAR of the disclosure comprises the nucleotide sequence set forth in SEQ ID NO: 126, or a nucleotide sequence having at least 50, at least 55, at least 60, at least 65, at least 70, at least 75, at least 80, at least 85, at least 90, at least 95, at least 96, at least 97, at least 98 or at least 99%, sequence identity with SEQ ID NO: 126. In certain embodiments, a PDZ CAR of the disclosure comprises a cytoplasmic domain comprising the amino acid sequence set forth in SEQ ID NO: 125. In certain embodiments, the nucleotide sequence that encodes the cytoplasmic domain of a PDZ CAR of the disclosure comprises the nucleotide sequence set forth in SEQ ID NO: 126.

[0214] In certain embodiments, a PDZ CAR of the disclosure comprises the amino acid sequence of SEQ ID NO: 115, or a variant thereof having at least 50, at least 55, at least 60, at least 65, at least 70, at least 75, at least 80, at least 85, at least 90, at least 95, at least 96, at least 97, at least 98 or at least 99%, sequence identity with SEQ ID NO: 115. In certain embodiments, a PDZ CAR of the disclosure is encoded by a nucleotide sequence that encodes the amino acid sequence of SEQ ID NO: 115, or a variant thereof having at least 50, at least 55, at least 60, at least 65, at least 70, at least 75, at least 80, at least 85, at least 90, at least 95, at least 96, at least 97, at least 98 or at least 99%, sequence identity with SEQ ID NO: 115. In certain embodiments, the nucleotide sequence that encodes a PDZ CAR of the disclosure comprises the nucleotide sequence set forth in SEQ ID NO: 116, or a nucleotide sequence having at least 50, at least 55, at least 60, at least 65, at least 70, at least 75, at least 80, at least 85, at least 90, at least 95, at least 96, at least 97, at least 98 or at least 99%, sequence identity with SEQ ID NO: 116. In certain embodiments, a PDZ CAR of the disclosure comprises an amino acid sequence set forth in SEQ ID NO: 115. In certain embodiments, the nucleotide sequence that encodes a PDZ CAR of the disclosure comprises the nucleotide sequence set forth in SEQ ID NO: 116.

### Vectors

[0215] The present disclosure provides recombinant vectors comprising a polynucleotide encoding a CAR comprising polynucleotides encoding the proteins disclosed above. In certain embodiments, the polynucleotide is operatively linked to at least one regulatory element for expression of the chimeric antigen receptor.

[0216] In certain embodiments, recombinant vectors of the disclosure comprise the nucleotide sequence of SEQ ID NO: 93, or a variant thereof having at least 50, at least 55, at least 60, at least 65, at least 70, at least 75, at least 80, at least 85, at least 90, at least 95, at least 96, at least 97, at least 98 or at least 99%, sequence identity with SEQ ID NO: 93. In certain embodiments, recombinant vectors comprise a nucleotide sequence that encodes the amino acid sequence of SEQ ID NO: 92, or a variant thereof having at least 50, at least 55, at least 60, at least 65, at least 70, at least 75, at least 80, at least 85, at least 90, at least 95, at least 96, at least 97, at least 98 or at least 99%, sequence identity with SEQ ID NO: 92.

[0217] In certain embodiments, recombinant vectors of the disclosure comprise the nucleotide sequence of SEQ ID NO: 116, or a variant thereof having at least 50, at least 55, at least 60, at least 65, at least 70, at least 75, at least 80, at least 85, at least 90, at least 95, at least 96, at least 97, at least 98 or at least 99%, sequence identity with SEQ ID NO: 116. In certain embodiments, recombinant vectors comprise a nucleotide sequence that encodes the amino acid sequence of SEQ ID NO: 115, or a variant thereof having at least 50, at least 55, at least 60, at least 65, at least 70, at least 75, at least 80, at least 85, at least 90, at least 95, at least 96, at least 97, at least 98 or at least 99%, sequence identity with SEQ ID NO: 115.

[0218] In certain embodiments, the recombinant vector comprises a polynucleotide encoding a CAR, wherein the polynucleotide is operatively linked to at least one additional gene. In some embodiments, the additional gene is a tCD19.

[0219] In certain embodiments, the vector is a viral vector. In certain embodiments, the viral vector can be, but is not limited to, a retroviral vector, an adenoviral vector, an adeno-associated virus vector, an alphaviral vector, a herpes virus vector, and a vaccinia virus vector. In some embodiments, the viral vector is a lentiviral vector.

[0220] In some embodiments, the vector is a non-viral vector. In some embodiments, the viral vector may be a plasmid or a transposon (such as a PiggyBac- or a Sleeping Beauty transposon).

[0221] In some embodiments, the non-viral vector may be a minicircle plasmid. In some embodiments, the non-viral vector may be a single or double stranded DNA molecule that is used as a template for homology directed repair (HDR) based gene editing.

[0222] In certain embodiments, the polynucleotide encoding the CAR is operably linked to at least a regulatory element. The regulatory element can be capable of mediating expression of the CAR in the host cell. Regulatory elements include, but are not limited to, promoters, enhancers, initiation sites, polyadenylation (polyA) tails, IRES elements, response elements, and termination signals. In certain embodiments, the regulatory element regulates CAR expression. In certain embodiments, the regulatory element increased the expression of the CAR. In certain embodiments, the regulatory element increased the expression of the CAR once the host cell is activated. In certain embodiments, the regulatory element decreases expression of the CAR. In certain embodiments, the regulatory element decreases expression of the CAR once the host cell is activated.

[0223] In some embodiments, the promoter is an inducible promoter. Non-limiting examples of an inducible promoter are lac, sp6, T7, and Hsp70- and Hsp90-derived promoters. In some embodiments, the inducible promoter is a tetracycline (Tc)-inducible promoter.

[0224] In some embodiments, the promoter may be a T cell-specific promoter or an NK cell-specific promoter.

### CAR-Modified Host Cells

[0225] In one aspect, the present disclosure provides an isolated host cell comprising a polynucleotide or a recombinant vector described herein. In one aspect, the present disclosure provides an isolated host cell comprising a CAR described herein. In some embodiments the CAR may comprise: (a) an extracellular domain, (b) a transmembrane domain, and (c) a cytoplasmic domain comprising a signaling domain and an anchoring domain which binds to a cell polarity protein.

[0226] In some embodiments, the extracellular domain comprises an antigen-binding moiety, wherein the antigen-binding moiety may comprise, for example, an antibody or an antibody fragment. In some embodiments, the antigen-binding moiety may comprise a single chain variable fragment (scFv) such as, but not limited to, an EphA2 scFv or a B7-H3 scFv. In some embodiments, the antigen-binding moiety may comprise a ligand or peptide sequence. In some embodiments, the antigen-binding moiety may comprise a VH sequence, a VL sequence, and/or CDRs disclosed herein. In some embodiments, the antigen-binding moiety may comprise an scFv derived from an antibody or antibody fragment that binds to an antigen target disclosed herein. In some embodiments, the antigen-binding moiety may comprise an antigen-binding moiety derived from a CAR that binds to an antigen target. In some embodiments, the antigen-binding moiety may bind to a tumor antigen, antigen of extracellular matrix, antigen present on cells within the tumor microenvironment, tissue-specific antigen, autoimmune antigen or infectious antigen disclosed herein.

[0227] In some embodiments, the cell polarity protein may comprise a PDZ domain. In some embodiments, the anchoring domain may comprise a PDZ binding motif (PDZbm). In some embodiments, the PDZbm binds to, for example, Scribble. As a non-limiting example, the PDZbm may be derived from Cytotoxic and Regulatory T cell Associated Molecule (CRTAM).

[0228] In a further aspect, the present disclosure provides an isolated host cell comprising two or more polynucleotides or recombinant vectors described herein. In a further aspect, the present disclosure provides an isolated host cell comprising two or more CARs described herein.

[0229] In various embodiments, the host cell may be an allogeneic cell. In various embodiments, the host cell may be an autologous cell. In some embodiments, the host cell may be derived from a blood, marrow, tissue, or a tumor sample. In some embodiments, the host cell may be derived from an induced pluripotent stem cell (iPSC).

[0230] In various embodiments, the host cell is an immune cell. In some embodiments, when the host cell is an immune cell, the immune cell may be derived from, for example, an induced pluripotent stem cell (IPS) cell. The immune cell may be a T-cell, a natural killer (NK) cell or a macrophage.

[0231] In various embodiments, the host cell is a T-cell. T-cells may include, but are not limited to, thymocytes, naive T lymphocytes, immature T lymphocytes, mature T lymphocytes, resting T lymphocytes, or activated T lymphocytes. A T-cell can be a T helper (Th) cell, for example a T helper 1 (Th1) or a T helper 2 (Th2) cell. The T-cell can be a helper T-cell (HTL; CD4+ T-cell) CD4+ T-cell, a cytotoxic T-cell (CTL; CD8+ T-cell), a tumor infiltrating cytotoxic T-cell (TIL; CD8+ T-cell), CD4+CD8+ T-cell, or any other subset of T-cells. Other illustrative populations of T-cells suitable for use in particular embodiments include naive T-cells memory T-cells, and NKT cells.

[0232] In some embodiments, the T-cell is selected from a CD8+ T-cell, a CD4+ T-cell, a cytotoxic T-cell, an αβ T-cell receptor (TCR) T-cell, an invariant natural killer T (INKT) cell, a γδ T-cell, a memory T-cell, a memory stem T-cell (TSCM), a naïve T-cell, an effector T-cell, a T-helper cell, or a regulatory T-cell (Treg).

[0233] In various embodiments, the host cell is a NK cell. NK cell refers to a differentiated lymphocyte with a CD3− CD16+, CD3− CD56+, CD16+ CD56+ and/or CD57+ TCR-phenotype.

[0234] In some embodiments, when the host cell is a NK cell, the NK cell may be derived from peripheral, cord blood, induced pluripotent stem cells (IPSCs), and/or a cell line, for example, but not limited to NK-92 cells

[0235] In various embodiments, the host cell has been activated and/or expanded ex vivo.

[0236] In various embodiments, the host cell is an allogeneic cell. In various embodiments, the host cell is an autologous cell.

[0237] In some embodiments, the host cell is isolated from a subject having a tumor. In some embodiments, the tumor can be found within, but not limited to, breast tissue, prostate tissue, bladder tissue, oral and/or dental tissue, head and/or neck tissue, colorectal tissue, lung tissue, brain tissue, skin, lymph nodes, and bone. In some embodiments, the tumor is a cancer. In some embodiments, the cancer can be, but not limited to, breast cancer, prostate cancer, bladder cancer, oral squamous cell carcinoma, head and/or neck squamous cell carcinoma, colorectal cancer, lung cancer, brain tumors, melanoma, bone, pediatric solid tumors and brain tumors, and/or lymphoma.

[0238] In certain embodiments, the host cell is isolated from a subject having a tumor, wherein one or more cells of the tumor cells express a tumor antigen disclosed herein. Non-limiting examples of tumor cells that express a tumor antigen include acute lymphoblastic leukemia, acute myeloid leukemia, adult solid tumors and brain tumors, adrenal gland tumors, anal cancer, bile duct cancer, bladder cancer, blood cancers, bone cancer, bowel cancer, brain tumors, breast cancer, cancer of unknown primary, cancer spread to bone, cancer spread to brain, cancer spread to liver, cancer spread to lung, carcinoid, cervical cancer, children's cancers, colorectal cancer, chronic lymphocytic leukemia, chronic myeloid leukemia, colorectal cancer, ear cancer, endometrial cancer, eye cancer, follicular dendritic cell sarcoma, gallbladder cancer, gastric cancer, gastro esophageal junction cancers, germ cell tumors, gestational trophoblastic disease, glioma, glioblastoma, gynecological cancer, hairy cell leukemia, head and neck squamous cell carcinoma, high grade gliomas, Hodgkin lymphoma, Kaposi's sarcoma, kidney cancer, large bowel and rectal neuroendocrine tumors, laryngeal cancer, leukemia, Linitis plastica of the stomach, liver cancer, low grade gliomas, lung cancer, lung neuroendocrine tumors (NETs), lymphoma, malignant schwannoma, mediastinal germ cell tumors, melanoma, men's cancer, merkel cell skin cancer, mesothelioma, molar pregnancy, mouth and oropharyngeal cancer, myeloma, nasal and paranasal sinus cancer, nasopharyngeal cancer, neuroblastoma, neuroendocrine tumors, neuroendocrine tumors of the pancreas, non-Hodgkin lymphoma, non-Hodgkin lymphoma in children, esophageal cancer, oral squamous cell carcinoma, ovarian cancer, pancreatic cancer, pediatric solid tumors and brain tumors, penile cancer, persistent trophoblastic disease and choriocarcinoma, pheochromocytoma, prostate cancer, pseudomyxoma peritonei, rare cancers, rectal cancer, renal cancer, retinoblastoma, salivary gland cancer, secondary cancer, signet cell cancer, skin cancer, small bowel cancer, small bowel neuroendocrine tumors, soft tissue sarcoma, stomach cancer, stomach neuroendocrine tumors, testis cancer, thymus gland tumors, thyroid cancer, tongue cancer, tonsil cancer, tumors of the adrenal gland, unknown primary cancer, urothelial, uterine cancer, vaginal cancer, vulval cancer, Wilms' tumor, and womb cancer.

[0239] Additional non-limiting examples of tumor cells that express a tumor antigen include glioblastoma, high grade gliomas, low grade gliomas, head and neck cancers, liver cancers, lung cancers, melanoma, ovarian cancer, pancreatic cancer, prostate cancer, renal cancer, urothelial cancer, carcinoid, cervical cancers, colorectal cancer, endometrial cancer, lymphoma, skin cancer, stomach cancer, testis cancer, thyroid cancer and urothelial cancer.

[0240] In some embodiments, the host cell is derived from a blood, marrow, tissue, or a tumor sample.

[0241] In one aspect, the present disclosure provides a method of generating an isolated host cell described herein. The method includes genetically modifying the host cell with a polynucleotide encoding a CAR and optionally an additional gene (e.g., tCD19). In some embodiments, the isolated host cell may be genetically modified, for example, to enhance its function by expressing additional genes (e.g., transcription factors (e.g., c-Jun) or cytokines (e.g., IL-15) or deleting inhibitory genes (e.g., REGNASE-1, CISH, DNMT3A) with gene editing technologies, including but not limited to CRISPR-Cas9, base editors, or transcription activator-like effector nucleases (TALENs). The genetically modifying step may be conducted in vivo or ex vivo. Suitable methods of genetic modification of immune cells to knock out inhibitory genes such as REGNASE-1, and DNMT3A include those described in, e.g., PCT patent applications WO2020/219682, WO2020/210365, which are incorporated herein by reference in their entireties.

[0242] In some embodiments, the genetically modifying step is conducted ex vivo. In some embodiments, the genetic modifying step may be conducted via a viral gene delivery. In some embodiments, the genetic modifying step may be conducted via a non-viral gene delivery. The method may further include activation and/or expansion of the host cell ex vivo before, after and/or during the genetic modification.

### Isolation/Enrichment

[0243] The host cells may be autologous/autogeneic (“self”) or non-autologous (“non-self,” e.g., allogeneic, syngeneic or xenogeneic). In certain embodiments, the host cells are obtained from a mammalian subject. In other embodiments, the host cells are obtained from a primate subject. In certain embodiments, the host cells are obtained from a human subject.

[0244] Lymphocytes can be obtained from sources such as, but not limited to, peripheral blood mononuclear cells, bone marrow, lymph nodes tissue, cord blood, thymus issue, tissue from a site of infection, ascites, pleural effusion, spleen tissue, and tumors. Lymphocytes may also be generated by differentiation of stem cells. In certain embodiments, lymphocytes can be obtained from blood collected from a subject using techniques generally known to the skilled person, such as sedimentation, e.g., FICOLL™ separation.

[0245] In certain embodiments, cells from the circulating blood of a subject are obtained by apheresis. An apheresis device typically contains lymphocytes, including T-cells, monocytes, granulocytes, B cells, other nucleated white blood cells, red blood cells, and platelets. In certain embodiments, the cells collected by apheresis may be washed to remove the plasma fraction and to place the cells in an appropriate buffer or media for subsequent processing. The cells can be washed with PBS or with another suitable solution that lacks calcium, magnesium, and most, if not all other, divalent cations. A washing step may be accomplished by methods known to those in the art, such as, but not limited to, using a semiautomated flowthrough centrifuge (e.g., Cobe 2991 cell processor, or the Baxter CytoMate). After washing, the cells may be resuspended in a variety of biocompatible buffers, cell culture medias, or other saline solution with or without buffer.

[0246] In certain embodiments, host cells can be isolated from peripheral blood mononuclear cells (PBMCs) by lysing the red blood cells and depleting the monocytes. As an example, the cells can be sorted by centrifugation through a PERCOLL™ gradient. In certain embodiments, after isolation of PBMC, both cytotoxic and helper T lymphocytes can be sorted into naive, memory, and effector T-cell subpopulations either before or after activation, expansion, and/or genetic modification.

[0247] In certain embodiments, T lymphocytes can be enriched. For example, a specific subpopulation of T lymphocytes, expressing one or more markers such as, but not limited to, CD3, CD4, CD8, CD14, CD15, CD16, CD19, CD27, CD28, CD34, CD36, CD45RA, CD45RO, CD56, CD62, CD62L, CD122, CD123, CD127, CD235a, CCR7, HLA-DR or a combination thereof using either positive or negative selection techniques. In certain embodiments, the T lymphocytes for use in the compositions of the disclosure do not express or do not substantially express one or more of the following markers: CD57, CD244, CD160, PD-1, CTLA4, TIM3, and LAG3.

[0248] In certain embodiments, NK cells can be enriched. For example, a specific subpopulation of T lymphocytes, expressing one or more markers such as, but not limited to, CD2, CD16, CD56, CD57, CD94, CD122 or a combination thereof using either positive or negative selection techniques.

### Stimulation/Activation

[0249] In order to reach sufficient therapeutic doses of host cell compositions, host cells are often subjected to one or more rounds of stimulation/activation. In certain embodiments, a method of producing host cells for administration to a subject comprises stimulating the host cells to become activated in the presence of one or more stimulatory signals or agents (e.g., compound, small molecule, e.g., small organic molecule, nucleic acid, polypeptide, or a fragment, isoform, variant, analog, or derivative thereof). In certain embodiments, a method of producing host cells for administration to a subject comprises stimulating the host cells to become activated and to proliferate in the presence of one or more stimulatory signals or agents.

[0250] Host cells (e.g., T lymphocytes and NK cells) can be activated by inducing a change in their biologic state by which the cells express activation markers, produce cytokines, proliferate and/or become cytotoxic to target cells. All these changes can be produced by primary stimulatory signals. Co-stimulatory signals amplify the magnitude of the primary signals and suppress cell death following initial stimulation resulting in a more durable activation state and thus a higher cytotoxic capacity.

[0251] T cells can be activated generally using methods as described, for example, in U.S. Pat. Nos. 6,352,694; 6,534,055; 6,905,680; 6,692,964; 5,858,358; 6,887,466; 6,905,681; 7,144,575; 7,067,318; 7,172,869; 7,232,566; 7,175,843; 5,883,223; 6,905,874; 6,797,514; and 6,867,041, each of which is incorporated herein by reference in its entirety.

[0252] In certain embodiments, the T-cell based host cells can be activated by binding to an agent that activates CD3ζ.

[0253] In other embodiments, a CD2-binding agent may be used to provide a primary stimulation signal to the T-cells. For example, and not by limitation, CD2 agents include, but are not limited to, CD2 ligands and anti-CD2 antibodies, e.g., the Tl 1.3 antibody in combination with the Tl 1.1 or Tl 1.2 antibody (Meuer, S. C. et al. (1984) Cell 36:897-906) and the 9.6 antibody (which recognizes the same epitope as TI 1.1) in combination with the 9-1 antibody (Yang, S. Y. et al. (1986) J. Immunol. 137:1097-1100). Other antibodies which bind to the same epitopes as any of the above-described antibodies can also be used.

[0254] In certain embodiments, the host cells are activated by administering phorbol myristate acetate (PMA) and ionomycine. In certain embodiments, the host cells are activated by administering an appropriate antigen that induces activation and then expansion. In certain embodiments, PMA, ionomycin, and/or appropriate antigen are administered with CD3 induce activation and/or expansion.

[0255] In general, the activating agents used in the present disclosure includes, but is not limited to, an antibody, a fragment thereof and a proteinaceous binding molecule with antibody-like functions. Examples of (recombinant) antibody fragments are Fab fragments, Fv fragments, single-chain Fv fragments (scFv), a divalent antibody fragment such as an (Fab) 2′-fragment, diabodies, triabodies (Iliades, P., et al., FEBS Lett (1997) 409, 437-441), decabodies (Stone, E., et al., Journal of Immunological Methods (2007) 318, 88-94) and other domain antibodies (Holt, L. J., et al., Trends Biotechnol. (2003), 21, 11, 484-490). The divalent antibody fragment may be an (Fab) 2′-fragment, or a divalent single-chain Fv fragment while the monovalent antibody fragment may be selected from the group consisting of a Fab fragment, a Fv fragment, and a single-chain Fv fragment (scFv).

[0256] In certain embodiments, one or more binding sites of the CD3ζ agents may be a bivalent proteinaceous artificial binding molecule such as a dimeric lipocalin mutein (i.e., duocalin). In certain embodiments the receptor binding reagent may have a single second binding site, (i.e., monovalent). Examples of monovalent agents include, but are not limited to, a monovalent antibody fragment, a proteinaceous binding molecule with antibody-like binding properties or an MHC molecule. Examples of monovalent antibody fragments include, but are not limited to a Fab fragment, a Fv fragment, and a single-chain Fv fragment (scFv), including a divalent single-chain Fv fragment.

[0257] The agent that specifically binds CD3 includes, but is not limited to, an anti-CD3-antibody, a divalent antibody fragment of an anti-CD3 antibody, a monovalent antibody fragment of an anti-CD3-antibody, and a proteinaceous CD3-binding molecule with antibody-like binding properties. A proteinaceous CD3-binding molecule with antibody-like binding properties can be an aptamer, a mutein based on a polypeptide of the lipocalin family, a glubody, a protein based on the ankyrin scaffold, a protein based on the crystalline scaffold, an adnectin, and an avimer. It also can be coupled to a bead.

[0258] In certain embodiments, the activating agent (e.g., CD3-binding agents) can be present in a concentration of about 0.1 to about 10 μg/ml. In certain embodiments, the activating agent (e.g., CD3-binding agents) can be present in a concentration of about 0.2 μg/ml to about 9 μg/ml, about 0.3 μg/ml to about 8 μg/ml, about 0.4 μg/ml to about 7 μg/ml, about 0.5 μg/ml to about 6 μg/ml, about 0.6 μg/ml to about 5 μg/ml, about 0.7 μg/ml to about 4 μg/ml, about 0.8 μg/ml to about 3 μg/ml, or about 0.9 μg/ml to about 2 μg/ml. In certain embodiments, the activating agent (e.g., CD3-binding agents) is administered at a concentration of about 0.1 μg/ml, about 0.2 μg/ml, about 0.3 μg/ml, about 0.4 μg/ml, about 0.5 μg/ml, about 0.6 μg/ml, about 0.7 μg/ml, about 0.8 μM, about 0.9 μg/ml, about 1 μg/ml, about 2 μg/ml, about 3 μg/ml, about 4 μM, about 5 μg/ml, about 6 μg/ml, about 7 μg/ml, about 8 μg/ml, about 9 μg/ml, or about 10 μg/ml. In certain embodiments, the CD3-binding agents can be present in a concentration of 1 μg/ml.

[0259] NK cells can be activated generally using methods as described, for example, in U.S. Pat. Nos. 7,803,376, 6,949,520, 6,693,086, 8,834,900, 9,404,083, 9,464,274, 7,435,596, 8,026,097, 8,877,182; U.S. Patent Applications US2004/0058445, US2007/0160578, US2013/0011376, US2015/0118207, US2015/0037887; and PCT Patent Application WO2016/122147, each of which is incorporated herein by reference in its entirety.

[0260] In certain embodiments, the NK based host cells can be activated by, for example and not limitation, inhibition of inhibitory receptors on NK cells (e.g., KIR2DL1, KIR2DL2/3, KIR2DL4, KIR2DL5A, KIR2DL5B, KIR3DL1, KIR3DL2, KIR3DL3, LILRB1, NKG2A, NKG2C, NKG2E or LILRB5 receptor).

[0261] In certain embodiments, the NK based host cells can be activated by, for example and not limitation, feeder cells (e.g., native K562 cells or K562 cells that are genetically modified to express 4-1BBL and cytokines such as IL15 or IL21).

[0262] In other embodiments, interferons or macrophage-derived cytokines can be used to activate NK cells. For example and not limitation, such interferons include but are not limited to interferon alpha and interferon gamma, and such cytokines include but are not limited to IL-15, IL-2, IL-21.

[0263] In certain embodiments, the NK activating agent can be present in a concentration of about 0.1 to about 10 μg/ml. In certain embodiments, the NK activating agent can be present in a concentration of about 0.2 μg/ml to about 9 μg/ml, about 0.3 μg/ml to about 8 μg/ml, about 0.4 μg/ml to about 7 μg/ml, about 0.5 μg/ml to about 6 μg/ml, about 0.6 μg/ml to about 5 μg/ml, about 0.7 μg/ml to about 4 μg/ml, about 0.8 μg/ml to about 3 μg/ml, or about 0.9 μg/ml to about 2 μg/ml. In certain embodiments, the NK activating agent is administered at a concentration of about 0.1 μg/ml, about 0.2 μg/ml, about 0.3 μg/ml, about 0.4 μg/ml, about 0.5 μg/ml, about 0.6 μg/ml, about 0.7 μg/ml, about 0.8 μM, about 0.9 μg/ml, about 1 μg/ml, about 2 μg/ml, about 3 μg/ml, about 4 μM, about 5 μg/ml, about 6 μg/ml, about 7 μg/ml, about 8 μg/ml, about 9 μg/ml, or about 10 μg/ml. In certain embodiments, the NK activating agent can be present in a concentration of 1 μg/ml.

[0264] In certain embodiments, the activating agent is attached to a solid support such as, but not limited to, a bead, an absorbent polymer present in culture plate or well or other matrices such as, but not limited to, Sepharose or glass; may be expressed (such as in native or recombinant forms) on cell surface of natural or recombinant cell line by means known to those skilled in the art.

### Polynucleotide Transfer

[0265] In certain embodiments, the host cells are genetically modified to express a CAR described above. The host cells can be genetically modified after stimulation/activation. In certain embodiments, the host cells are modified within 12 hours, 16 hours, 24 hours, 36 hours, or 48 hours of stimulation/activation. In certain embodiments, the cells are modified within 16 to 24 hours after stimulation/activation. In certain embodiments, the host cells are modified within 24 hours.

[0266] In order to genetically modify the host cell to express the CAR, the CAR polynucleotide construct must be transferred into the host cell. Polynucleotide transfer may be via viral or non-viral gene methods. Suitable methods for polynucleotide delivery for use with the current methods include any method known by those of skill in the art, by which a polynucleotide can be introduced into an organelle, cell, tissue or organism.

[0267] In some embodiments, polynucleotides are transferred to the cell in a non-viral vector. In some embodiments, the non-viral vector is a transposon. Exemplary transposons that can be used in the present disclosure include, but are not limited to, a sleeping beauty transposon and a PiggyBac transposon.

[0268] Nucleic acid vaccines can be used to transfer CAR polynucleotides into the host cells. Such vaccines include, but are not limited to non-viral polynucleotide vectors, “naked” DNA and RNA, and viral vectors. Methods of genetically modifying cells with these vaccines, and for optimizing the expression of genes included in these vaccines are known to those of skill in the art.

[0269] In certain embodiments, the host cells can be genetically modified by methods ordinarily used by one of skill in the art. In certain embodiments, the host cells can be transduced via retroviral transduction. References describing retroviral transduction of genes are Anderson et al., U.S. Pat. No. 5,399,346; Mann et al., Cell 33:153 (1983); Temin et al., U.S. Pat. No. 4,650,764; Temin et al., U.S. Pat. No. 4,980,289; Markowitz et al., J. Virol. 62:1120 (1988); Temin et al., U.S. Pat. No. 5,124,263; International Patent Publication No. WO 95/07358, published Mar. 16, 1995, by Dougherty et al.; and Kuo et al., Blood 82:845 (1993), each of which is incorporated herein by reference in its entirety.

[0270] One method of genetic modification includes ex vivo modification. Various methods are available for transfecting cells and tissues removed from a subject via ex vivo modification. For example, retroviral gene transfer in vitro can be used to genetically modified cells removed from the subject and the cell transferred back into the subject. See e.g., Wilson et al., Science, 244:1344-1346, 1989 and Nabel et al., Science, 244 (4910): 1342-1344, 1989, both of which are incorporated herein by reference in their entity. In certain embodiments, the host cells may be removed from the subject and transfected ex vivo using the polynucleotides (e.g., expression vectors) of the disclosure. In certain embodiments, the host cells obtained from the subject can be transfected or transduced with the polynucleotides (e.g., expression vectors) of the disclosure and then administered back to the subject.

[0271] Another method of gene transfer includes injection. In certain embodiments, a cell or a polynucleotide or viral vector may be delivered to a cell, tissue, or organism via one or more injections (e.g., a needle injection). Non-limiting methods of injection include injection of a composition (e.g., a saline based composition). Polynucleotides can also be introduced by direct microinjection. Non-limiting sites of injection include, subcutaneous, intradermal, intramuscular, intranodal (allows for direct delivery of antigen to lymphoid tissues). intravenous, intraprostatic, intratumor, intralymphatic (allows direct administration of DCs) and intraperitoneal. It is understood that proper site of injection preparation is necessary (e.g., shaving of the site of injection to observe proper needle placement).

[0272] Electroporation is another method of polynucleotide delivery. See e.g., Potter et al., (1984) Proc. Nat'l Acad. Sci. USA, 81, 7161-7165 and Tur-Kaspa et al., (1986) Mol. Cell Biol., 6, 716-718, both of which are incorporated herein in their entirety for all purposes. Electroporation involves the exposure of a suspension of cells and DNA to a high-voltage electric discharge. In certain embodiments, cell wall-degrading enzymes, such as pectin-degrading enzymes, can be employed to render the host cells more susceptible to genetic modification by electroporation than untreated cells. See e.g., U.S. Pat. No. 5,384,253, incorporated herein by reference in its entirety for all purposes.

[0273] In vivo electroporation involves a basic injection technique in which a vector is injected intradermally in a subject. Electrodes then apply electrical pulses to the intradermal site causing the cells localized there (e.g., resident dermal dendritic cells), to take up the vector. These tumor antigen-expressing dendritic cells activated by local inflammation can then migrate to lymph-nodes.

[0274] Methods of electroporation for use with this disclosure include, for example, Sardesai, N. Y., and Weiner, D. B., Current Opinion in Immunotherapy 23:421-9 (2011) and Ferraro, B. et al., Human Vaccines 7:120-127 (2011), both of which are hereby incorporated by reference herein in their entirety for all purposes.

[0275] Additional methods of polynucleotide transfer include liposome-mediated transfection (e.g., polynucleotide entrapped in a lipid complex suspended in an excess of aqueous solution. See e.g., Ghosh and Bachhawat, (1991) In: Liver Diseases, Targeted Diagnosis and Therapy Using Specific Receptors and Ligands. pp. 87-104). Also contemplated is a polynucleotide complexed with Lipofectamine, or Superfect); DEAE-dextran (e.g., a polynucleotide is delivered into a cell using DEAE-dextran followed by polyethylene glycol. See e.g., Gopal, T. V., Mol Cell Biol. 1985 May; 5 (5): 1188-90); calcium phosphate (e.g., polynucleotide is introduced to the cells using calcium phosphate precipitation. See e.g., Graham and van der Eb, (1973) Virology, 52, 456-467; Chen and Okayama, Mol. Cell Biol., 7 (8): 2745-2752, 1987), and Rippe et al., Mol. Cell Biol., 10:689-695, 1990); sonication loading (introduction of a polynucleotide by direct sonic loading. See e.g., Fechheimer et al., (1987) Proc. Nat'l Acad. Sci. USA, 84, 8463-8467); microprojectile bombardment (e.g., one or more particles may be coated with at least one polynucleotide and delivered into cells by a propelling force. See e.g., U.S. Pat. Nos. 5,550,318; 5,538,880; 5,610,042; and PCT Application WO 94/09699; Klein et al., (1987) Nature, 327, 70-73, Yang et al., (1990) Proc. Nat'l Acad. Sci. USA, 87, 9568-9572); and receptor-mediated transfection (e.g., selective uptake of macromolecules by receptor-mediated endocytosis that will be occurring in a target cell using cell type-specific distribution of various receptors. See e.g., Wu and Wu, (1987) J. Biol. Chem., 262, 4429-4432; Wagner et al., Proc. Natl. Acad. Sci. USA, 87 (9): 3410-3414, 1990; Perales et al., Proc. Natl. Acad. Sci. USA, 91:4086-4090, 1994; Myers, EPO 0273085; Wu and Wu, Adv. Drug Delivery Rev., 12:159-167, 1993; Nicolau et al., (1987) Methods Enzymol., 149, 157-176), each reference cited here is incorporated by reference in their entirety for all purposes.

[0276] In further embodiments, host cells are genetically modified using gene editing with homology-directed repair (HDR). Homology-directed repair (HDR) is a mechanism used by cells to repair double strand DNA breaks. In HDR, a donor polynucleotide with homology to the site of the double strand DNA break is used as a template to repair the cleaved DNA sequence, resulting in the transfer of genetic information from the donor polynucleotide to the DNA. As such, new nucleic acid material may be inserted or copied into a target DNA cleavage site. Double strand DNA breaks in host cells may be induced by a site-specific nuclease. The term “site-specific nuclease” as used herein refers to a nuclease capable of specifically recognizing and cleaving a nucleic acid (DNA or RNA) sequence. Suitable site-specific nucleases for use in the present disclosure include, but are not limited to, RNA-guided endonuclease (e.g., CRISPR-associated (Cas) proteins), zinc finger nuclease, a TALEN nuclease, or mega-TALEN nuclease. For example, a site-specific nuclease (e.g., a Cas9+ guide RNA) capable of inducing a double strand break in a target DNA sequence is introduced to a host cell, along with a donor polynucleotide encoding a CAR of the present disclosure and optionally an additional protein (e.g., tCD19).

### Expansion/Proliferation

[0277] After the host cells are activated and transduced, the cells are cultured to proliferate. T-cells may be cultured for at least 1, 2, 3, 4, 5, 6, or 7 days, at least 2 weeks, at least 1, 2, 3, 4, 5, or 6 months or more with 1, 2, 3, 4, 5, 6, 7, 8, 9, or 10 or more rounds of expansion.

[0278] Agents that can be used for the expansion of T-cells can include interleukins, such as IL-2, IL-7, IL-15, or IL-21 (see for example Cornish et al. 2006, Blood. 108 (2): 600-8, Bazdar and Sieg, 2007, Journal of Virology, 2007, 81 (22): 12670-12674, Battalia et al, 2013, Immunology, 139 (1): 109-120). Other illustrative examples for agents that may be used for the expansion of T-cells are agents that bind to CD8, CD45 or CD90, such as αCD8, αCD45 or αCD90 antibodies. Illustrative examples of T-cell population including antigen-specific T-cells, T helper cells, cytotoxic T-cells, memory T-cell (an illustrative example of memory T-cells are CD62L|CD8| specific central memory T-cells) or regulatory T-cells (an illustrative example of Treg are CD4+CD25+CD45RA+ Treg cells).

[0279] Additional agents that can be used to expand T lymphocytes includes methods as described, for example, in U.S. Pat. Nos. 6,352,694; 6,534,055; 6,905,680; 6,692,964; 5,858,358; 6,887,466; 6,905,681; 7,144,575; 7,067,318; 7,172,869; 7,232,566; 7,175,843; 5,883,223; 6,905,874; 6,797,514; and 6,867,041, each of which is incorporated herein by reference in its entirety.

[0280] In certain embodiments, the agent(s) used for expansion (e.g., IL-2) are administered at about 20 units/ml to about 200 units/ml. In certain embodiments, the agent(s) used for expansion (e.g., IL-2) are administered at about 25 units/ml to about 190 units/ml, about 30 units/ml to about 180 units/ml, about 35 units/ml to about 170 units/ml, about 40 units/ml to about 160 units/ml, about 45 units/ml to about 150 units/ml, about 50 units/ml to about 140 units/ml, about 55 units/ml to about 130 units/ml, about 60 units/ml to about 120 units/ml, about 65 units/ml to about 110 units/ml, about 70 units/ml to about 100 units/ml, about 75 units/ml to about 95 units/ml, or about 80 units/ml to about 90 units/ml. In certain embodiments, the agent(s) used for expansion (e.g., IL-2) are administered at about 20 units/ml, about 25 units/ml, about 30 units/ml, 35 units/ml, 40 units/ml, 45 units/ml, about 50 units/ml, about 55 units/ml, about 60 units/ml, about 65 units/ml, about 70 units/ml, about 75 units/ml, about 80 units/ml, about 85 units/ml, about 90 units/ml, about 95 units/ml, about 100 units/ml, about 105 units/ml, about 110 units/ml, about 115 units/ml, about 120 units/ml, about 125 units/ml, about 130 units/ml, about 135 units/ml, about 140 units/ml, about 145 units/ml, about 150 units/ml, about 155 units/ml, about 160 units/ml, about 165 units/ml, about 170 units/ml, about 175 units/ml, about 180 units/ml, about 185 units/ml, about 190 units/ml, about 195 units/ml, or about 200 units/ml. In certain embodiments, the agent(s) used for expansion (e.g., IL-2) are administered at about 5 mg/ml to about 10 ng/ml. In certain embodiments, the agent(s) used for expansion (e.g., IL-2) are administered at about 5.5 ng/ml to about 9.5 ng/ml, about 6 ng/ml to about 9 ng/ml, about 6.5 ng/ml to about 8.5 ng/ml, or about 7 ng/ml to about 8 ng/ml. In certain embodiments, the agent(s) used for expansion (e.g., IL-2) are administered at about 5 ng/ml, 6 ng/ml, 7 ng/ml, 8 ng/ml, 9 ng/ml, or 10 ng/ml.

[0281] After the host cells are activated and transduced, the cells are cultured to proliferate. NK cells may be cultured for at least 1, 2, 3, 4, 5, 6, or 7 days, at least 2 weeks, at least 1, 2, 3, 4, 5, or 6 months or more with 1, 2, 3, 4, 5, 6, 7, 8, 9, or 10 or more rounds of expansion.

[0282] Agents that can be used for the expansion of natural killer cells can include agents that bind to CD16 or CD56, such as for example αCD16 or αCD56 antibodies. In certain embodiments, the binding agent includes antibodies (see for example Hoshino et al, Blood. 1991 Dec. 15; 78 (12): 3232-40). Other agents that may be used for expansion of NK cells may be IL-15 (see for example Vitale et al. 2002. The Anatomical Record. 266:87-92, which is hereby incorporated by reference in its entirety for all purposes).

[0283] Conditions appropriate for T-cell culture include an appropriate media (e.g., Minimal Essential Media (MEM), RPMI Media 1640, Lonza RPMI 1640, Advanced RPMI, Clicks, AIM-V, DMEM, a-MEM, F-12, TexMACS, X-Vivo 15, and X-Vivo 20, Optimizer, with added amino acids, sodium pyruvate, and vitamins, either serum-free or supplemented with an appropriate amount of serum (or plasma) or a defined set of hormones, and/or an amount of cytokine(s) sufficient for the growth and expansion).

[0284] Examples of other additives for host cell expansion include, but are not limited to, surfactant, piasmanate, pH buffers such as HEPES, and reducing agents such as N-acetyl-cysteine and 2-mercaptoethanol, Antibiotics (e.g., penicillin and streptomycin), are included only in experimental cultures, not in cultures of cells that are to be infused into a subject. The target cells are maintained under conditions necessary to support growth, for example, an appropriate temperature (e.g., 37° C.) and atmosphere (e.g., air plus 5% CO₂).

[0285] In certain embodiments, host cells of the present disclosure may be modified such that the expression of an endogenous TCR, MHC molecule, or other immunogenic molecule is decreased or eliminated. When allogeneic cells are used, rejection of the therapeutic cells may be a concern as it may cause serious complications such as the graft-versus-host disease (GvHD). Although not wishing to be bound by theory, immunogenic molecules (e.g., endogenous TCRs and/or MHC molecules) are typically expressed on the cell surface and are involved in self vs non-self discrimination. Decreasing or eliminating the expression of such molecules may reduce or eliminate the ability of the therapeutic cells to cause GvHD.

[0286] In certain embodiments, expression of an endogenous TCR in the host cells is decreased or eliminated. In a particular embodiment, expression of an endogenous TCR (e.g., αβ TCR) in the host cells is decreased or eliminated. Expression of the endogenous TCR may be decreased or eliminated by disrupting the TRAC locus, TCR beta constant locus, and/or CD3 locus. In certain embodiments, expression of an endogenous TCR may be decreased or eliminated by disrupting one or more of the TRAC, TRBC1, TRBC2, CD3E, CD3G, and/or CD3D locus.

[0287] In certain embodiments, expression of one or more endogenous MHC molecules in the host cells is decreased or eliminated. Modified MHC molecule may be an MHC class I or class II molecule. In certain embodiments, expression of an endogenous MHC molecule may be decreased or eliminated by disrupting one or more of the MHC, β2M, TAP1, TAP2, CIITA, RFX5, RFXAP and/or RFXANK locus.

[0288] Expression of the endogenous TCR, an MHC molecule, and/or any other immunogenic molecule in the host cell can be disrupted using genome editing techniques such as Clustered regularly interspaced short palindromic repeats (CRISPR)/Cas, zinc finger nucleases (ZFNs), transcription activator-like effector nucleases (TALENs), and Meganucleases. These genome editing methods may disrupt a target gene by entirely knocking out all of its output or partially knocking down its expression. In a particular embodiment, expression of the endogenous TCR, an MHC molecule and/or any other immunogenic molecule in the host cell is disrupted using the CRISPR/Cas technique.

### Pharmaceutical Compositions

[0289] In some embodiments, the compositions comprise one or more polypeptides of the CARs and other related molecules (e.g., second CAR), polynucleotides, vectors comprising same, and cell compositions, as disclosed herein. Compositions of the present disclosure include but are not limited to pharmaceutical compositions.

[0290] In one aspect, the present disclosure provides a pharmaceutical composition comprising a polynucleotide or a recombinant vector described herein, and a pharmaceutically accepted carrier and/or excipient.

[0291] In another aspect, the present disclosure provides pharmaceutical composition comprising the CAR-modified host cells described herein and a pharmaceutically acceptable carrier and/or excipient. In some embodiments, the host cells are modified with a CAR comprising a PDZbm (i.e., PDZ CAR) disclosed herein.

[0292] In another aspect, the present disclosure provides pharmaceutical composition comprising host cells modified with a PDZ CAR and host cells modified with a PDZ CAR, and a pharmaceutically acceptable carrier and/or excipient.

[0293] Examples of pharmaceutical carriers include but are not limited to sterile liquids, such as water and oils, including those of petroleum, animal, vegetable or synthetic origin, such as peanut oil, soybean oil, mineral oil, sesame oil and the like. Water or aqueous solution saline solutions and aqueous dextrose and glycerol solutions are preferably employed as carriers, particularly for injectable solutions.

[0294] Compositions comprising CAR-modified host cells disclosed herein may comprise buffers such as neutral buffered saline, phosphate buffered saline and the like; carbohydrates such as glucose, mannose, sucrose or dextrans, mannitol; proteins; polypeptides or amino acids such as glycine; antioxidants; chelating agents such as EDTA or glutathione; adjuvants (e.g., aluminum hydroxide); and preservatives.

[0295] Compositions comprising CAR-modified host cells disclosed herein may comprise one or more of the following: sterile diluents such as water for injection, saline solution, preferably physiological saline, Ringer's solution, isotonic sodium chloride, fixed oils such as synthetic mono or diglycerides which may serve as the solvent or suspending medium, polyethylene glycols, glycerin, propylene glycol or other solvents; antibacterial agents such as benzyl alcohol or methyl paraben; antioxidants such as ascorbic acid or sodium bisulfite; chelating agents such as ethylenediaminetetraacetic acid; buffers such as acetates, citrates or phosphates and agents for the adjustment of tonicity such as sodium chloride or dextrose.

[0296] In some embodiments, the compositions are formulated for parenteral administration, e.g., intravascular (intravenous or intraarterial), intraperitoneal, intratumoral, intraventricular, intrapleural or intramuscular administration. The parenteral preparation can be enclosed in ampoules, disposable syringes or multiple dose vials made of glass or plastic. An injectable pharmaceutical composition is preferably sterile. In some embodiments, the composition is reconstituted from a lyophilized preparation prior to administration.

[0297] In some embodiments, the CAR-modified host cells may be mixed with substances that adhere or penetrate then prior to their administration, e.g., but not limited to, nanoparticles.

### Therapeutic Methods

[0298] In one aspect, the present disclosure provides a method for treating a tumor in a subject in need thereof. A therapeutically effective amount of the CAR-modified host cells described herein or the pharmaceutical composition comprising the host cells is administered to the subject.

[0299] The term “tumor” refers to a benign or malignant abnormal growth of tissue. The term “tumor” includes cancer. Examples of tumors are, but not limited to, the soft tissue tumors (e.g., lymphomas), and tumors of the blood and blood-forming organs (e.g., leukemias), and solid tumors, which is one that grows in an anatomical site outside the bloodstream (e.g., carcinomas). Examples of cancer include, but are not limited to, carcinoma, lymphoma, blastoma, sarcoma (e.g., osteosarcoma or rhabdomyosarcoma), and leukemia or lymphoid malignancies. More particular examples of such cancers include squamous cell cancer (e.g., epithelial squamous cell cancer), adenosquamous cell carcinoma, lung cancer (e.g., including small-cell lung cancer, non-small cell lung cancer, adenocarcinoma of the lung, squamous carcinoma of the lung), cancer of the peritoneum, hepatocellular cancer, gastric or stomach cancer (e.g., including gastrointestinal cancer, pancreatic cancer), cervical cancer, ovarian cancer, liver cancer, bladder cancer, cancer of the urinary tract, hepatoma, breast cancer, colon cancer, rectal cancer, colorectal cancer, endometrial or uterine carcinoma, salivary gland carcinoma, kidney or renal cancer, prostate cancer, vulval cancer, thyroid cancer, hepatic carcinoma, anal carcinoma, penile carcinoma, primary or metastatic melanoma, multiple myeloma and B-cell lymphoma, non-Hodgkin's lymphoma, Hodgkin's lymphoma, brain (e.g., high grade glioma, diffuse pontine glioma, ependymoma, neuroblastoma, or glioblastoma), as well as head and neck cancer, and associated metastases. Additional examples of tumors can be found in The Merck Manual of Diagnosis and Therapy, 19th Edition, § on Hematology and Oncology, published by Merck Sharp & Dohme Corp., 2011 (ISBN 978-0-911910-19-3); The Merck Manual of Diagnosis and Therapy, 20th Edition, § on Hematology and Oncology, published by Merck Sharp & Dohme Corp., 2018 (ISBN 978-0-911-91042-1) (2018 digital online edition at internet website of Merck Manuals); and SEER Program Coding and Staging Manual 2016, each of which are incorporated by reference in their entirety for all purposes.

[0300] In some embodiments, host cells modified with a PDZ CAR, or pharmaceutical compositions thereof, are administered to a subject to treat a tumor expressing a tumor antigen disclosed herein. Non-limiting examples of tumors expressing a tumor antigen disclosed herein include acute lymphoblastic leukemia, acute myeloid leukemia, adult solid tumors and brain tumors, adrenal gland tumors, anal cancer, bile duct cancer, bladder cancer, blood cancers, bone cancer, bowel cancer, brain tumors, breast cancer, cancer of unknown primary, cancer spread to bone, cancer spread to brain, cancer spread to liver, cancer spread to lung, carcinoid, cervical cancer, children's cancers, colorectal cancer, chronic lymphocytic leukemia, chronic myeloid leukemia, colorectal cancer, ear cancer, endometrial cancer, eye cancer, follicular dendritic cell sarcoma, gallbladder cancer, gastric cancer, gastro esophageal junction cancers, germ cell tumors, gestational trophoblastic disease, glioma, glioblastoma, gynecological cancer, hairy cell leukemia, head and neck squamous cell carcinoma, high grade gliomas, Hodgkin lymphoma, Kaposi's sarcoma, kidney cancer, large bowel and rectal neuroendocrine tumors, laryngeal cancer, leukemia, Linitis plastica of the stomach, liver cancer, low grade gliomas, lung cancer, lung neuroendocrine tumors (NETs), lymphoma, malignant schwannoma, mediastinal germ cell tumors, melanoma, men's cancer, merkel cell skin cancer, mesothelioma, molar pregnancy, mouth and oropharyngeal cancer, myeloma, nasal and paranasal sinus cancer, nasopharyngeal cancer, neuroblastoma, neuroendocrine tumors, neuroendocrine tumors of the pancreas, non-Hodgkin lymphoma, non-Hodgkin lymphoma in children, esophageal cancer, oral squamous cell carcinoma, ovarian cancer, pancreatic cancer, pediatric solid tumors and brain tumors, penile cancer, persistent trophoblastic disease and choriocarcinoma, pheochromocytoma, prostate cancer, pseudomyxoma peritonei, rare cancers, rectal cancer, renal cancer, retinoblastoma, salivary gland cancer, secondary cancer, signet cell cancer, skin cancer, small bowel cancer, small bowel neuroendocrine tumors, soft tissue sarcoma, stomach cancer, stomach neuroendocrine tumors, testis cancer, thymus gland tumors, thyroid cancer, tongue cancer, tonsil cancer, tumors of the adrenal gland, unknown primary cancer, urothelial, uterine cancer, vaginal cancer, vulval cancer, Wilms' tumor, and womb cancer.

[0301] In some embodiments, host cells modified with a PDZ CAR pharmaceutical compositions thereof, are administered to a subject to treat a tumor expressing additional tumor antigens disclosed herein. Non-limiting examples of additional tumor expressing additional tumor antigens include breast cancer, brain tumors such as, but not limited to, glioblastoma, high grade gliomas, low grade gliomas, head and neck cancers, liver cancers, lung cancers, melanoma, ovarian cancer, pancreatic cancer, prostate cancer, renal cancer, urothelial cancer, carcinoid, cervical cancers, colorectal cancer, endometrial cancer, lymphoma, skin cancer, stomach cancer, testis cancer, thyroid cancer and urothelial cancer.

[0302] The compositions and methods described in the present disclosure may be used to treat an autoimmune disease or disorder such as, psoriasis, vasculitis, Wegener's granulomatosis, Hashimoto's thyroiditis, Graves' disease, chronic inflammatory demyelinating polyneuropathy, Guillain-Barre syndrome, Crohn's disease, ulcerative colitis, Rheumatoid arthritis (RA), multiple sclerosis (MS), Sjögren's syndrome, Systemic lupus erythematosus, sarcoidosis, Type 1 diabetes mellitus, insulin dependent diabetes mellitus (IDDM), autoimmune thyroiditis, reactive arthritis, ankylosing spondylitis, scleroderma, polymyositis, dermatomyositis, or Myasthenia gravis.

[0303] The compositions and methods described in the present disclosure may be used to treat an infectious disease. Infectious diseases are well known to those skilled in the art, and non-limiting examples include but are not limited to infections of viral etiology such as HIV, influenza, Herpes, viral hepatitis, Epstein Bar, polio, viral encephalitis, measles, chicken pox, Papilloma virus; infections of bacterial etiology such as pneumonia, tuberculosis, syphilis; or infections of parasitic etiology such as malaria, trypanosomiasis, leishmaniasis, trichomoniasis, amoebiasis.

[0304] In some embodiments, host cells modified a PDZ CAR, or pharmaceutical compositions thereof, may be administered to a subject to treat any diseases described above.

[0305] In cases where the CAR-modified host cells also express a CD20 polypeptide, the method may further include administering an anti-CD20 antibody to the subject for removal of the isolated host cells. The anti-CD20 antibody is administered in an amount effective for sufficient removal of the isolated host cells from the subject. In some embodiments, the anti-CD20 antibody is administered in an amount effective for removal of more than 50% of the isolated host cells from the subject. For example, the anti-CD20 antibody may be administered in an amount effective for removal of more than 55%, more than 60%, more than 65%, more than 70%, more than 75%, more than 80%, more than 85%, more than 90%, more than 95%, more than 98%, more than 99%, or about 100% of the isolated host cells from the subject. The anti-CD20 antibody may be administered in an amount effective for removal of about 50% to about 70%, about 60% to about 80%, about 70% to about 90%, or about 80% to about 100% of the isolated host cells from the subject.

[0306] Non-limiting examples of anti-CD20 antibodies that can be used for removal the isolated host cells include Rituximab, Ibritumomab tiuxetan, Tositumomab, Ofatumumab, Ocrelizumab, TRU-015, Veltuzumab, AME-133v, PRO131921, and Obinutuzumab. In some embodiments, the anti-CD20 antibody is Rituximab.

[0307] In some embodiments, the therapeutic method of the present disclosure includes one or more of the following steps: (a) isolating immune cells from the subject or donor; (b) modifying the immune cells ex vivo with a polynucleotide encoding a CAR and optionally an additional protein, a second CAR, or a recombinant vector comprising the same; (c) optionally, expanding and/or activating the modified immune cells before, after and/or during step (b); (d) introducing a therapeutically effective amount of the modified immune cells into the subject, and (e) in cases when the modified immune cells comprise the CD20 suicide switch, optionally, administering an anti-CD20 antibody to the subject, wherein the anti-CD20 antibody is administered in an amounts effective for removal of the modified immune cells from the subject. The immune cells may be T-cells and/or NK cells and/or macrophages.

[0308] In some embodiments, the therapeutic method of the present disclosure includes one or more of the following steps: (a) isolating NK cells, T cells, or macrophages or from a subject; (b) genetically modifying said NK cells, T cells, or macrophages ex vivo with any of the polynucleotides or the vectors described herein; (c) optionally, expanding and/or activating said NK cells, T cells, or macrophages before, after or during step (b); and (d) introducing the genetically modified NK cells, T cells, or macrophages into the subject.

[0309] In some embodiments, the subject is human.

[0310] In some embodiments, the modified host cell is an autologous cell. In some embodiments, the modified host cell is an allogeneic cell. In cases where the host cell is isolated from a donor, the method may further include a method to prevent graft vs host disease (GVHD) and the host cell rejection.

[0311] In some embodiments of any of the therapeutic methods described above, the composition is administered in a therapeutically effective amount. The dosages of the composition administered in the methods of the disclosure will vary widely, depending upon the subject's physical parameters, the frequency of administration, the manner of administration, the clearance rate, and the like. The initial dose may be larger and might be followed by smaller maintenance doses. The dose may be administered as infrequently as weekly or biweekly, or fractionated into smaller doses and administered daily, semi-weekly, etc., to maintain an effective dosage level. It is contemplated that a variety of doses will be effective to achieve in vivo persistence of modified host cells. It is also contemplated that a variety of doses will be effective to improve in vivo effector function of modified host cells.

[0312] In some embodiments, composition comprising the modified host cells manufactured by the methods described herein may be administered at a dosage of 10² to 10¹⁰ cells/kg body weight, 10⁵ to 10⁹ cells/kg body weight, 10⁵ to 10⁸ cells/kg body weight, 10⁵ to 10⁷ cells/kg body weight, 10⁷ to 10⁹ cells/kg body weight, or 10⁷ to 10⁸ cells/kg body weight, including all integer values within those ranges. The number of modified host cells will depend on the therapeutic use for which the composition is intended for.

[0313] Modified host cells may be administered multiple times at dosages listed above. The modified host cells may be allogeneic, syngeneic, xenogeneic, or autologous to the patient undergoing therapy.

[0314] The compositions and methods described in the present disclosure may be utilized in conjunction with other types of therapy for tumors, such as chemotherapy, surgery, radiation, gene therapy, and so forth.

[0315] It is also contemplated that when used to treat various diseases/disorders, the compositions and methods of the present disclosure can be utilized with other therapeutic methods/agents suitable for the same or similar diseases/disorders. Such other therapeutic methods/agents can be co-administered (simultaneously or sequentially) to generate additive or synergistic effects. Suitable therapeutically effective dosages for each agent may be lowered due to the additive action or synergy.

[0316] In some embodiments of any of the above therapeutic methods, the method further comprises administering to the subject one or more additional compounds selected from the group consisting of immuno-suppressives, biologicals, probiotics, prebiotics, and cytokines (e.g., IFN or IL-2).

[0317] As a non-limiting example, the disclosure can be combined with other therapies that block inflammation (e.g., via blockage of IL1, INFα/β, IL6, TNF, IL23, etc.).

[0318] The methods and compositions of the disclosure can be combined with other immunomodulatory treatments such as, e.g., therapeutic vaccines (including but not limited to GVAX, DC-based vaccines, etc.), checkpoint inhibitors (including but not limited to agents that block CTLA4, PD1, LAG3, TIM3, etc.) or activators (including but not limited to agents that enhance 4-1BB, OX40, etc.). The methods of the disclosure can be also combined with other treatments that possess the ability to modulate NKT function or stability, including but not limited to CD1d, CD1d-fusion proteins, CD1d dimers or larger polymers of CD1d either unloaded or loaded with antigens, CD1d-chimeric antigen receptors (CD1d-CAR), or any other of the five known CD1 isomers existing in humans (CD1a, CD1b, CD1c, CD1e). The methods of the disclosure can also be combined with other treatments such as midostaurin, enasidenib, or a combination thereof.

[0319] Therapeutic methods of the disclosure can be combined with additional immunotherapies and therapies. For example, when used for treating tumors, the compositions of the disclosure can be used in combination with conventional therapies, such as, e.g., surgery, radiotherapy, chemotherapy or combinations thereof, depending on type of the tumor, patient condition, other health issues, and a variety of factors. In certain aspects, other therapeutic agents useful for combination tumor therapy with the inhibitors of the disclosure include anti-angiogenic agents. Many anti-angiogenic agents have been identified and are known in the art, including, e.g., TNP-470, platelet factor 4, thrombospondin-1, tissue inhibitors of metalloproteases (TIMP1 and TIMP2), prolactin (16-Kd fragment), angiostatin (38-Kd fragment of plasminogen), endostatin, bFGF soluble receptor, transforming growth factor beta, interferon alpha, soluble KDR and FLT-1 receptors, placental proliferin-related protein, as well as those listed by Carmeliet and Jain (2000). In one embodiment, the modified host cells of the disclosure can be used in combination with a VEGF antagonist or a VEGF receptor antagonist such as anti-VEGF antibodies, VEGF variants, soluble VEGF receptor fragments, aptamers capable of blocking VEGF or VEGFR, neutralizing anti-VEGFR antibodies, inhibitors of VEGFR tyrosine kinases and any combinations thereof (e.g., anti-hVEGF antibody A4.6.1, bevacizumab or ranibizumab).

[0320] Non-limiting examples of chemotherapeutic compounds which can be used in combination treatments of the present disclosure include, for example, aminoglutethimide, amsacrine, anastrozole, asparaginase, azacitidine, bcg, bicalutamide, bleomycin, buserelin, busulfan, campothecin, capecitabine, carboplatin, carmustine, chlorambucil, cisplatin, cladribine, clodronate, colchicine, cyclophosphamide, cyproterone, cytarabine, dacarbazine, dactinomycin, daunorubicin, decitabine, dienestrol, diethylstilbestrol, docetaxel, doxorubicin, epirubicin, estradiol, estramustine, etoposide, exemestane, filgrastim, fludarabine, fludrocortisone, fluorouracil, fluoxymesterone, flutamide, gemcitabine, genistein, goserelin, hydroxyurea, idarubicin, ifosfamide, imatinib, interferon, irinotecan, irinotecan, letrozole, leucovorin, leuprolide, levamisole, lomustine, mechlorethamine, medroxyprogesterone, megestrol, melphalan, mercaptopurine, mesna, methotrexate, mitomycin, mitotane, mitoxantrone, nilutamide, nocodazole, octreotide, oxaliplatin, paclitaxel, pamidronate, pentostatin, plicamycin, porfimer, procarbazine, raltitrexed, rituximab, streptozocin, suramin, tamoxifen, temozolomide, teniposide, testosterone, thioguanine, thiotepa, titanocene dichloride, topotecan, trastuzumab, tretinoin, vinblastine, vincristine, vindesine, and vinorelbine.

[0321] These chemotherapeutic compounds may be categorized by their mechanism of action into, for example, following groups: anti-metabolites/anti-tumor agents, such as pyrimidine analogs (5-fluorouracil, floxuridine, capecitabine, gemcitabine and cytarabine) and purine analogs, folate antagonists and related inhibitors (mercaptopurine, thioguanine, pentostatin and 2-chlorodeoxyadenosine (cladribine)); antiproliferative/antimitotic agents including natural products such as vinca alkaloids (vinblastine, vincristine, and vinorelbine), microtubule disruptors such as taxane (paclitaxel, docetaxel), vincristin, vinblastin, nocodazole, epothilones and navelbine, epipodophyllotoxins (etoposide, teniposide), DNA damaging agents (actinomycin, amsacrine, anthracyclines, bleomycin, busulfan, camptothecin, carboplatin, chlorambucil, cisplatin, cyclophosphamide, cytoxan, dactinomycin, daunorubicin, doxorubicin, epirubicin, hexamethyhnelamineoxaliplatin, iphosphamide, melphalan, merchlorehtamine, mitomycin, mitoxantrone, nitrosourea, plicamycin, procarbazine, taxol, taxotere, teniposide, triethylenethiophosphoramide and etoposide (VP16)); antibiotics such as dactinomycin (actinomycin D), daunorubicin, doxorubicin (adriamycin), idarubicin, anthracyclines, mitoxantrone, bleomycins, plicamycin (mithramycin) and mitomycin; enzymes (L-asparaginase which systemically metabolizes L-asparagine and deprives cells which do not have the capacity to synthesize their own asparagine); antiplatelet agents; antiproliferative/antimitotic alkylating agents such as nitrogen mustards (mechlorethamine, cyclophosphamide and analogs, melphalan, chlorambucil), ethylenimines and methylmelamines (hexamethylmelamine and thiotepa), alkyl sulfonates-busulfan, nitrosoureas (carmustine (BCNU) and analogs, streptozocin), trazenes-dacarbazinine (DTIC); antiproliferative/antimitotic antimetabolites such as folic acid analogs (methotrexate); platinum coordination complexes (cisplatin, carboplatin), procarbazine, hydroxyurea, mitotane, aminoglutethimide; hormones, hormone analogs (estrogen, tamoxifen, goserelin, bicalutamide, nilutamide) and aromatase inhibitors (letrozole, anastrozole); anticoagulants (heparin, synthetic heparin salts and other inhibitors of thrombin); fibrinolytic agents (such as tissue plasminogen activator, streptokinase and urokinase), aspirin, dipyridamole, ticlopidine, clopidogrel, abciximab; antimigratory agents; antisecretory agents (breveldin); immunosuppressives (cyclosporine, tacrolimus (FK-506), sirolimus (rapamycin), azathioprine, mycophenolate mofetil); anti-angiogenic compounds (e.g., TNP-470, genistein, bevacizumab) and growth factor inhibitors (e.g., fibroblast growth factor (FGF) inhibitors); angiotensin receptor blocker; nitric oxide donors; anti-sense oligonucleotides; antibodies (trastuzumab); cell cycle inhibitors and differentiation inducers (tretinoin); mTOR inhibitors, topoisomerase inhibitors (doxorubicin (adriamycin), amsacrine, camptothecin, daunorubicin, dactinomycin, eniposide, epirubicin, etoposide, idarubicin and mitoxantrone, topotecan, irinotecan), corticosteroids (cortisone, dexamethasone, hydrocortisone, methylpednisolone, prednisone, and prenisolone); growth factor signal transduction kinase inhibitors; mitochondrial dysfunction inducers and caspase activators; and chromatin disruptors.

[0322] In various embodiments of the methods described herein, the subject is a human. The subject may be a juvenile or an adult, of any age or sex.

[0323] In accordance with the present disclosure there may be numerous tools and techniques within the skill of the art, such as those commonly used in molecular biology, pharmacology, and microbiology. Such tools and techniques are described in detail in e.g., Sambrook et al. (2001) Molecular Cloning: A Laboratory Manual. 3rd ed. Cold Spring Harbor Laboratory Press: Cold Spring Harbor, New York; Ausubel et al. eds. (2005) Current Protocols in Molecular Biology. John Wiley and Sons, Inc.: Hoboken, NJ; Bonifacino et al. eds. (2005) Current Protocols in Cell Biology. John Wiley and Sons, Inc.: Hoboken, NJ; Coligan et al. eds. (2005) Current Protocols in Immunology, John Wiley and Sons, Inc.: Hoboken, NJ; Coico et al. eds. (2005) Current Protocols in Microbiology, John Wiley and Sons, Inc.: Hoboken, NJ; Coligan et al. eds. (2005) Current Protocols in Protein Science, John Wiley and Sons, Inc.: Hoboken, NJ; and Enna et al. eds. (2005) Current Protocols in Pharmacology, John Wiley and Sons, Inc.: Hoboken, NJ.

### EXAMPLES

[0324] The present invention is also described and demonstrated by way of the following examples. However, the use of these and other examples anywhere in the specification is illustrative only and in no way limits the scope and meaning of the invention or of any exemplified term. Likewise, the invention is not limited to any particular preferred embodiments described here. Indeed, many modifications and variations of the invention may be apparent to those skilled in the art upon reading this specification, and such variations can be made without departing from the invention in spirit or in scope. The invention is therefore to be limited only by the terms of the appended claims along with the full scope of equivalents to which those claims are entitled.

### Example 1. The PDZ Binding Moiety Scaffolding Anchor Enhances CAR NK Cell Synapse Formation

[0325] It was theorized that synapse modulation or tuning to an increasingly ordered state would result in an efficient and effective CAR. NK cells were selected for use in the present Examples since they have an innate ability to kill tumor cells and contain ˜5- to 7-fold more lytic granules compared to T cells^{12,13}. Likewise, NK cells are not known to cause graft versus host disease, and tumor cells have a reduced ability to evade attack due to the multiple targeting paradigms that are employed outside of the CAR:Antigen recognition axis¹⁴.

[0326] To improve CAR synapse formation, Postsynaptic density-95, Discs large, and Zona occludens 1 binding motifs (PDZbms) was selected as a focal point of the present disclosure. There are roughly 400 proteins that contain PDZ domains, and many of these are typically associated with highly polarized epithelial, endothelial, and neuronal cells¹⁵. Additionally, there are some PDZbms that aid in synapse formation and establishment of polarity of immune cells⁴. One of these motif-containing proteins, Cytotoxic and Regulatory T cell Associated Molecule (CRTAM) is a binding partner of Scribble, a PDZ domain containing intracellular scaffolding protein and mainly described in epithelial junctions⁵. CRTAM has been studied in T and NK cells^{4,16}, and CRTAM plays a role in NK cell tumor immunosurveillance¹⁷. Thus, the PDZbm of CRTAM was selected for addition to the C-terminus (CAR.PDZ) of a CD28z CAR (CAR)¹⁸, which targets the tyrosine kinase, ephrin type-A receptor 2 (EphA2) or B7-H3, a tumor associated antigen expressed in a broad range of solid tumors^{19,20} (FIGS. 1A-1B). CAR NK cells were generated from cultured primary peripheral blood NK cells by retroviral transduction and CAR, CAR.PDZ, and a non-functional control CAR (CAR Δ) were expressed equally with no significant differences on the cell surface of NK cells across numerous donors (FIGS. 7A-7B). Additionally, the CAR modifications did not alter the immunophenotype of NK cells (FIG. 7C).

[0327] First, it was determined if the PDZbm modulates CAR NK cell synapse formation in the singular context of EphA2. Recombinant human EphA2 protein was doped to poly-L-lysine coated glass slide and CAR NK cells were allowed to incubate and interact for 0 or 30 minutes (FIG. 1I-1P). Synaptic area, downstream signaling via ZAP70 phosphorylation, and lysosomal polarization were assessed via confocal microscopy. A marked difference was found between CAR.PDZ and CAR constructs in the synaptic area (FIG. 1C) and pZAP70 accumulation at the immune synapse (FIG. 1D). The synaptic area was more condensed for CAR.PDZ and pZAP70 was increased in CAR.PDZ NK cells suggesting a more efficient signaling cascade (FIG. 1D). pERK levels were additionally assessed via flow cytometry and enhanced levels were found over 120 minutes (FIG. 17). Lysosomal polarization trended toward elevated levels in CAR.PDZ NK cells, which suggests cytotoxic vesicle recruitment to the immune synapse is enhanced (FIG. 1E). CAR.PDZ constructs were also found to induce a significantly greater accumulation of Scribble (FIG. 1F and FIG. 1G), confirming the functionality of the PDZ domain. This accumulation was time dependent as differences were not observed at 30 minutes (FIGS. 8A-8B). Furthermore, an increase in a cytoplasmic splice variant of CD3ε⁴⁴ that co-localized with Scribble was observed as determined by the Pearson correlation coefficient specifically in CAR.PDZ NK cells (FIG. 1H).

[0328] Other synaptic protein polarizations were next investigated. Given the importance of f-actin polymerization in synapse formation Wiskott/Aldrich syndrome protein (WASp) was explored. WASp regulates f-actin polymerization⁴⁵ and a rapid accumulation of WASp was found in PDZ.CAR NK cells upon antigen recognition (FIG. 9). Thus, including a PDZ domain results in improved synapse formation, as judged by a condensed synaptic area with higher levels of phosphorylation (pZAP70) and recruitment of additional signaling molecules (CD3ε).

[0329] Given the multifactorial signal integration that NK cells calculate on a per cell basis^{14,21}, the complex binding between NK cells and tumor cells, specifically A549 lung adenocarcinoma cells, was explored. A single cell avidity measurement technology, z-MOVI™, that determines the precise binding force between effector and target cell was utilized. CAR.PDZ constructs were shown to have amplified binding capabilities followed by acoustic force exposure (FIG. 2A-2B). No difference between standard CAR and non-signaling CAR constructs were found, further demonstrating the lack of internal super structure being formed in a traditional CAR signaling cascade (FIG. 2C). CAR binding specificity was confirmed with a A549 cell line in which EphA2 was knocked out (KO) by CRISPR/Cas 9 gene editing (FIG. 2D and FIG. 2E).

[0330] Noting the enhanced binding strength of CAR.PDZ cells over a short period of time, calcium flux, which is a first step of immune cell activation, was assessed next⁴⁶. Utilizing live cell image analysis, single cell calcium flux levels were quantified (FIG. 2F) and a greater calcium burst was found in CAR.PDZ NK cells (FIG. 2G) as well as relatively higher and sustained levels over 30 minutes in comparison to other NK cell populations (untransduced, CAR, CAR Δ). Additionally, the time from calcium flux to lysosomal aggregation was quantified in these cells. CAR.PDZ NK cells were faster at coalescing the lysosomes compared to all other groups (FIG. 10). Findings were next confirmed in the DIPG007 glioma cells, including another control: NK cells expressing CAR.PDZs in which the C-terminal amino acid of the PDZbm was mutated, to render it non-functional (CAR.PDZmut). The greatest calcium flux was observed in CAR.PDZ NK cells compared to all other groups; further, CAR Δ, CAR, and CAR.PDZmut had similar calcium flux levels (FIG. 2H). These results directly link a functional PDZbm as being important to enhance NK cell activation.

[0331] These findings were expanded upon with another cancer cell line, LM7, and similar results were found (FIG. 1I). Additionally, another CAR was created containing the PDZbm targeting B7-H3 (FIG. 12A-12B), a common tumor associated antigen studied previously^{47,48} and similar results as with the EphA2 targeting CARs were found (FIG. 12C). The synapse size created between NK cells and tumor cells was also explored. In agreement with the initial data with antigen coated slides, CAR.PDZ NK cells had a smaller synapse area upon LM7 tumor cell interaction (FIG. 12D). Consistent with the previous calcium flux experiments, CAR.PDZ NK cells display enhanced flux against LM7 cells as well (FIG. 12E). Taken together, the enhanced calcium flux, smaller synapse area, and faster lysosome congregation all indicate a more efficient synapse formation

### Example 2. CAR.PDZ NK Cells have Enhanced Cytokine Production, Cytolytic Activity, and Invasive Properties

[0332] The functional consequences of the amplified signaling via zeta chain of T cell receptor associated protein kinase 70 (ZAP70) of CAR.PDZ NK cells was investigated in the present Example. To explore cytokine production upon target cell interaction, a 4-hour co-culture assay with A549 cells analyzing single cell secretomic profiles for each CAR construct was employed utilizing an IsoLight™ system (FIG. 3A). In particular, there was a significant increase in the frequency of perforin- and interferon gamma (IFNγ)-secreting CAR.PDZ NK cells in comparison to CAR NK cells (FIG. 3B). The latter finding is consistent with the observed amplified signaling via ZAP70 in CAR.PDZ NK cells, since IFNγ production typically takes the highest level of activation stimulus²². An increased frequency of granulocyte-macrophage colony-stimulating factor (GM-CSF), tumor necrosis factor alpha (TNFα), macrophage inflammatory protein 1 alpha (MIP-1α), and macrophage inflammatory protein 1 beta (MIP-1β) producing CAR.PDZ NK cells versus CAR NK cells was also observed (FIG. 3B). CAR.PDZ NK cells exhibited greater polyfunctionality, as judged by their ability to secrete multiple cytokines, in comparison to other NK cell populations (FIG. 3C). To assess the quality of cytokine production, the polyfunctional strength index (PSI), which accounts for the frequency of cells secreting cytokine and the relative intensity of cytokine produced, was calculated. IFNγ PSI was highest in CAR.PDZ NK cells (FIG. 3E), which mirrored the secretion frequency data, and that the ‘effector cytokine’ group PSI was increased in CAR.PDZ versus CAR NK cells (FIG. 3E). Finally, spectral t-SNE mapping of the signal intensity of selected cytokines (GM-CSF, IFNγ, IL-8, TNFα), chemokines (MCP-1, MIP-1α, MIP-1β) and molecules of cytolytic granules (granzyme B, perforin) revealed a distinct grouping of cells with a unique mapping of CAR.PDZ NK cells compared to other NK cell populations (FIGS. 3F-3N). Intriguingly, CAR Δ NK cells exhibited enhanced secretions compared to untransduced NK cells and in some instances similar levels to the signaling CARs. This finding may be due to the antigen recognition domain binding target cells and giving more opportunity for endogenous receptors to engage cognate ligands and become activated.

[0333] The cytolytic activity in CAR NK cells in two-dimensional (2D) and three-dimensional (3D) culture systems was next explored. In a standard 24-hour 2D MTS viability assay (FIG. 4A), CAR.PDZ NK cells exhibited superior cytolytic activity against A549 tumor cells in comparison to CAR NK cells at all evaluated effector-to-target (E:T) ratios, except for the highest E:T ratio (FIG. 4B). Assessing the mutated PDZbm CAR.PDZmut NK cells revealed a similar killing profile to standard CAR NK cells and a significantly reduced capacity compared to functional CAR.PDZ NK cells (FIG. 4C). Conversely, the functional consequences of CAR.PDZ binding to Scribble by blocking this interaction with a peptide Scribble PDZ antagonist resulted in reduced cytotoxicity (FIG. 4D). The greatest inhibitory effect was seen in CAR.PDZ NK cells as quantified by area between the curves analysis (FIGS. 4D-4E).

[0334] In a 3D assay, which consisted of a mixture of mCherry-positive 143b osteosarcoma cells and collagen in droplets surrounded by a ring of NK cells in Matrigel (FIG. 4F), CAR.PDZ NK cells reduced tumoroid size to a greater degree than did CAR NK cells (FIG. 4G). NK cells were then labeled with a green-fluorescent dye and tracked over 48 hours. CAR.PDZ cells also exhibited an enhanced ability to migrate to the droplet and invade to the center of the well in comparison to CAR NK cells (FIGS. 4H-4I). Thus, adding a PDZbm to CARs enhances not only their cytolytic potential, but also their migratory activity consistent with the known biological roles of Scribble in cell polarity and migration⁶.

### Example 3. CAR.PDZ NK Cells Extend Survival and Eradicate Solid Tumors In Vivo

[0335] In the present Example, the anti-tumor efficacy of untransduced, CAR Δ, CAR, and CAR.PDZ NK cells were compared in three solid tumor xenograft models. Tumor cells were implanted subcutaneously in an A549 lung adenocarcinoma model and treated with NK cells intravenously 14 days later (FIG. 5A). Untreated tumors and tumors treated with untransduced NK cells showed rapid outgrowth. In contrast, CAR Δ, CAR, and CAR.PDZ NK cells had anti-tumor activity, including complete responses (CRs) for CAR and CAR.PDZ NK cells (FIG. 5B). Only mice treated with CAR.PDZ NK cells had a significant overall survival benefit in comparison to CAR Δ NK cell treated mice (FIG. 5C). The median survival of CAR.PDZ NK cell treated mice was 16 days greater than for CAR NK cell treated mice (FIG. 5C). The same CAR NK cell populations were next evaluated in a locoregional osteosarcoma model. Mice were injected intraperitoneally with firefly luciferase expressing LM7 cells followed by injection of NK cells on day 7 (FIG. 5D). Only, CAR.PDZ and CAR NK cells induced tumor regression, including CRs, as judged by bioluminescence imaging (FIG. 5E). Mice treated with CAR.PDZ NK cells had a significant survival advantage in comparison to all other treatment groups including CAR NK cells (FIG. 5F). These findings were extended to a third tumor model, 143b, which is a highly aggressive osteosarcoma. 143b cells were implanted subcutaneously and treated with NK cells 5 days later (FIG. 5G). All groups of mice except CAR.PDZ NK cell treated mice rapidly grew. This was observed in both the previous EphA2 targeting CARs and B7-H3 targeting CARs (FIG. 5H). Again, only CAR.PDZ NK treated mice had an increase in survival (FIG. 5I-5J).

[0336] The functional persistence of CAR NK cell in mice that had achieved a CR was further evaluated in both models. In the A549 model, mice were re-challenged with the original tumor cell dose ˜4 months after initial therapy. Palpable tumor nodules were measured 7 days post injection; however, large tumors never formed, and nodules had disappeared by day 14 (FIG. 13A). Likewise, LM7 tumors were rejected post rechallenge ˜4 months after initial therapy (FIGS. 13B-13C). Thus, CAR NK cells persisted and retained anti-tumor capabilities even though NSG mice do not endogenously produce cytokines that supported their survival.

[0337] Noting the observed increases in avidity and IFNγ secretion, it was hypothesized that CAR T cells for solid tumors could be aided by the CAR design⁴⁹. To explore this, the same CAR constructs were used as before and the in vitro attributes of CAR.PDZ T cells were evaluated. No alterations in immunophenotype of CAR.PDZ T cells were found (FIG. 14A-14E). Upon co-culture with various solid tumor cells lines, CAR.PDZ T cells secreted more IFNγ and similar levels of TNFα, IL-6, and GMCSF (FIG. 14F). T cell synapse formation was next explored with DIPG7c (FIG. 6A-6B) and LM7 (FIG. 15A) tumor cells using live cell imaging along with calcium flux measurements for DIPG7c (FIG. 6C), LM7, U87, and DIPG007 (FIGS. 15B-15D). CAR.PDZ T cells had greater calcium flux and smaller synapse area as compared to CAR T cells, consistent with the notion of a more efficient synapse formation in all cases. These results were consistent with previous NK cell data indicating a cell agnostic immune synapse augmentation. Further, no functional correlation to tumor cell surface expression of the CAR antigen was found (FIG. 16).

[0338] For in vivo studies, patient derived orthotopic xenograft (PDOX) diffuse intrinsic pontine glioma (DIPG) models were a focus, as well as the highly aggressive 143b osteosarcoma model. In both DIPG models, CAR.PDZ T cells had greater antitumor activity in comparison to standard CAR T cells (FIGS. 6D-6I). Notably, full tumor eradication was observed in the DIPG7c model only in by CAR.PDZ T cells (FIGS. 6H-6I). CAR.PDZ T cells also had greater antitumor activity (FIG. 6J) in the 143b model, resulting in improved survival in comparison to mice treated with standard CAR T cells (FIG. 6K-6I). Off-target toxicities were not observed in any studies. Overall, adding a PDZbm to a CAR enhances not only the effector function of CAR NK but also CAR T cells.

[0339] The present study exploits the naturally occurring cell polarity requirements for immune cell recognition of target cells. Cell polarity is a tightly regulated process that has limited targets to augment without unintended consequences. To this end, it was found that the extant PDZbm of CRTAM would be a candidate to explore for the synapse tuned design described herein. Further, the current biological understanding of CRTAM is that it is a late phase polarity protein that aids in cell signaling after antigen recognition. By accelerating this process, a more efficient signaling CAR could be created, and effector cells imbued with enhanced functionality and longevity.

[0340] Persistence has been long thought as a hurdle of NK cell therapies, and many investigators are working on deciphering and attempting to solve this problem²³, including engineering NK cells to express IL-15, priming NK cells with cytokines to induce a “memory-like” phenotype, or culturing NK cells with various ligand expressing feeder cells²⁴ to enhance persistence. The culturing system herein involves low dose interleukin (IL)-2, 10 IU/mL, and a single, initial feeder cell stimulation. Utilizing a low stimulation level, putatively, reduces the potential for dependence on high levels of cytokine to maintain growth and survival post adoptive transfer into a harsh environment. However, directly tracking and assessing NK cell persistence needs to be performed to fully ascertain if enhanced NK cell survival occurred in vivo. Additionally, adding this domain to the C-terminal of other endogenous receptors, such as CD16, may enhance antibody-based therapeutics through antibody dependent cellular cytotoxicity.

[0341] NK cells have been derived from peripheral blood (PB)³¹, cord blood (CB)²⁵, induced pluripotent stem cell (iPSC)²⁷, or existing cell lines, e.g., NK9234. NK cells derived from these sources have been evaluated in clinical studies with an encouraging safety record to date^{24,29} The focus the study described herein was on PB-derived CAR NK cells since they are readily available from healthy donors. PB has been largely overlooked as a CAR NK cell source, especially in the context of solid tumor-redirected CAR NK cell therapy³⁰. For example, there are only a few preclinical publications that report in vivo experiments, all of which utilized repeat dosing regimens, high dose cytokine supplementation, or both³⁰. Thus, results described herein can provide impetus for the active exploration of PB-derived CAR NK cells. NK cells, regardless of source, need migratory, polarization, and internal scaffolding programs to be effectively employed as anti-cancer therapeutics.

[0342] Thus, CAR.PDZ developed herein can enhance the effector function of all NK cell products. Further studies to cross compare and modulate alternate NK-specific endodomain based CARs will be needed to fully define the role of PDZbms in NK CAR applications. Finally, since PDZbms and their interactions with scaffolding proteins is evolutionarily conserved, it is likely that PDZbms will enhance the effector function of other CAR-expressing immune cells, including T cells that are actively being explored as immunotherapeutics. The synapse-tuned CAR design described herein can enhance antigen sensitivity and, putatively, reduce the risk of cancer immune evasion by antigen loss⁵⁰, which contributes to the low overall response rate of CAR T cell therapies for solid tumors^{51,52}.

[0343] Exploration into CAR synapse tuning is at present a sparsely populated field with studies observing differences between various standard CAR designs such as bi-specific CARS^{53,54} and CARS with different costimulatory domains^{55,56}. The Examples herein reveal distinct advantages by adding a domain designed to augment the synapse. A plethora of research has been performed in optimizing CAR designs looking at external factors such as single chain variable fragment (scFv) affinity and which costimulatory domain compliments the overall activation domain. However, these efforts have been in the context of an inefficient synapse. Orienting focus to the inside of the cell to determine optimal organization of the synapse takes an orthogonal and complimentary approach to current research efforts. Re-evaluating previously discarded CAR designs with a different lens of synapse tuning may give life to previously shelved ideas. In conclusion, the present Examples demonstrate that an optimal CAR endodomain might not only have to include costimulatory and activation domains, but also a PDZbm-based anchoring domain. Thus, synapse tuning via anchor domains represents a fertile realm to explore for CAR-based immunotherapies.

### Materials and Methods Used in the Examples

[0344] Below are the methods used in the Examples described above.

### Cell Lines

[0345] 143b osteosarcoma and A549 lung cancer cell lines were obtained and grown as per American Type Culture Collection (ATCC, Manassas, VA, USA) instructions. LM7, a metastatic osteosarcoma cell line, was provided by Dr. Eugenie Kleinerman (MD Anderson Cancer Center, Houston, Texas, USA) in 2011. The generation of LM7 cells expressing an enhanced green fluorescent protein firefly luciferase fusion protein (LM7.eGFP.ffLuc) was previously described³¹. K562 with modified membrane bound IL-15 and 4-1BB ligand³², feeder cells, were a generous gift from Dr. Dario Campana (National University of Singapore), and grown in Iscove Modified Dulbecco Media (IMDM) media with 10% fetal bovine serum (FBS; Hyclone Laboratories, Chicago, IL, USA). The EphA2 KO A549 cell line was generated with CRISPR/Cas9 technology using a published method³³. HSJD-DIPG007 (DIPG007) cells were cultured as described previously⁵⁷. DIPG7c cells were cultured as previously described⁵⁸. Cell lines were validated with short tandem repeat profiling performed by ATCC.

### Generation of Retroviral Vectors

[0346] The generation of the SFG retroviral vectors encoding EphA2-CARs with a CD28 costimulatory domain (CAR), a nonfunctional EphA2-CAR without a signaling domain (CAR 4) were previously described¹⁸. B7-H3 CARs were generated similarly to as previously described⁴⁷ In-Fusion cloning (Takara Bio, Kusatsu, Shiga, Japan) was used to generate the CAR.PDZ with a PDZbm attached to the C-terminus of CD3ζ domain and site directed mutagenesis Q5 (New England Biolabs, Ipswich, MA, USA) was used to do a point mutation to exchange the final Valine to an Alanine to create the CAR.PDZmut construct.

[0347] CAR.PDZ additional sequence containing PDZbm: HPMRCMNYITKLYSEAKTKRKENVQHSKLEEKHIQVPESIV* (SEQ ID NO: 3)

[0348] CAR.PDZ additional sequence containing mutated PDZbm: HPMRCMNYITKLYSEAKTKRKENVQHSKLEEKHIQVPESIA* (SEQ ID NO: 113)

[0349] The sequence of the final construct was verified by Sanger sequencing (Hartwell Center, St. Jude Children's Research Hospital). Retroviral particles were generated as previously described³⁴ by transient transfection of HEK293T cells (ATCC) with the EphA2-CAR encoding SFG retroviral vectors, Peg-Pam-e plasmid encoding MoML V gag-pol, and a plasmid encoding the RD114 envelope protein. Supernatants were collected after 48 hours, filtered, and snap-frozen for later transduction of NK cells.

### NK Cell Activation, Expansion, and Genetic Modification.

[0350] Human peripheral blood mononuclear cells (PBMCs) were obtained from whole blood of healthy donors under an Institutional Review Board (IRB) approved protocol at St. Jude Children's Research Hospital (St. Jude), after informed consent was obtained in accordance with the Declaration of Helsinki, or from de-identified elutriation chambers of leukapheresis products obtained from St. Jude donor center. Donors were less than haplo-identically matched by HLA typing. Cells were subjected to ACK Red Blood cell lysis and Ficoll Hypaque (Sigma-Aldrich, St. Louis, MO, USA) gradient separation. Cellular subtype analysis was performed with BD whole blood analysis kit on a BD Lyric flow cytometer (Becton-Dickinson, Franklin Lakes, NJ, USA). PBMCs were depleted of CD4 and CD8 using standard MACs magnetic beads (CD4: 130-045-101, CD8: 130-045-201, Miltenyi Biotec, Bergisch Gladbach, North Rhine-Westphalia, Germany). Cells were aliquoted in freezing media with 10% DMSO at 1×10⁷ cells per mL and stored in liquid nitrogen vapor phase until use. 150 Gray cesium-irradiated feeder cells were added to thawed CD4/8-depleted PBMCs at a ratio of 5-10:1 feeder to NK cells. Cells were grown in Stemcell Genix (20802-0500, Cellgenix, Portsmouth, MA, USA) growth media with 20% FBS and 10 units/mL of IL-2, (Peprotech, Rocky Hill, NJ, USA) (complete growth media). After 5-7 days cells were phenotyped and used for downstream experiments.

[0351] Genetically modified NK cells were generated as follows: Supernatants containing retroviral particles encoding CAR constructs were spun at 2000g in retronectin (T100B, Takara Bio) coated non-tissue culture 24-well plates for 90 minutes. Supernatants were removed and 250,000 NK cells were seeded per well in a volume of 1 mL of complete growth media. NK cells were incubated for 24 hours and then removed and cultured complete growth media. Modified NK cells were expanded in G-Rex 6 well plates for 10-14 days (#80240MWilson Wolf, New Brighton, MN, USA). NK cell transgene expression was assessed 3-7 days post-transduction.

### T Cell Activation, Expansion, and Genetic Modification

[0352] CAR T cells were generated via isolating PBMCs by Lymphoprep (Abbott Laboratories) gradient centrifugation and then stimulated on precoated non-tissue culture-treated 24-well plates with CD3 and CD28 antibodies (αCD3/αCD28; CD3: OKT3, CD28: 15E8; Miltenyi Biotec). The following day, rhIL-7 and rhIL-15 (IL-7:10 ng/ml; IL-15:5 ng/ml; PeproTech) were added in complete growth media RPMI (Gibco) with 10% FBS (Hyclone) and 1% Glutamax (Gibco). T cells were transduced in the same manner as NK cells detailed previously. On day 5, transduced T cells were transferred into new tissue culture 24-well plates and subsequently expanded with IL-7 and IL-15. Untransduced T cells were prepared in the same way except for the addition of retrovirus. CAR T cell expression was determined using flow cytometry on numerous days post-transduction.

### Flow Cytometry

[0353] 250,000 NK cells were collected and washed twice in DPBS. Surface EphA2-CAR or B7-H3-CAR detection was determined via immunolabeling with anti-F(ab′)2-AF647 (109-606-006, Jackson Labs, Bar Harbor, ME, USA; 1:100), was utilized for detection on a BD FACS Lyric machine and analyzed with FlowJo v10 (BD Biosciences). Exemplary immunophenotyping antibodies are listed in Table 6.

TABLE 6
Exemplary immunophenotype antibodies

| Specificity | Clone | Fluorochrome | Company | Catalogue # |
|---|---|---|---|---|
| CD3 | OKT3 | Superbright 600 | Thermofisher | 63-0037-42 |
| CD56 | NCAM16.2 | PE-TX red | BD Biosciences | 564849 |
| CD62L | DREG-56 | BB515 | BD Biosciences | 464742 |
| NKG2D | ID11 | PerCPeFluor710 | Thermofisher | 46-5878-42 |
| CD57 | NK-1 | PE | BD Biosciences | 560844 |
| CD16 | REA423 | APC-H7 | BD Biosciences | 560715 |
| NKG2C | REA205 | PE Vio 770 | Miltenyi Biotec | 130-119-776 |
| CD8 | SK1 | PerCP | Biolegend | 344708 |
| CD45RA | HI100 | APC | Biolegend | 304112 |
| CD197(CCR7) | G043H7 | FITC | Biolegend | 353216 |
| CD4 | SK3 | PE/Cy7 | Biolegend | 344612 |
| CD276 | 7-517 | BV421 | BD Biosciences | 565829 |

### Single Cell Secretomics Assay

[0354] Briefly, 100,000 NK cells were labeled with cell trace violet 1:500 (ThermoFisher Scientific, Waltham, MA, USA), and co-cultured at a 2:1 ratio with A549 targets for 4-hours in a 48-well plate. NK cells were removed and washed twice with PBS and resuspended in complete growth media without IL-2. These cells were loaded onto a IsoCode single cell secretomic chip and run on the IsoLight machine that detects 32 distinct proteins³⁵. Results were analyzed on IsoSpeak version 2.8.1.0 (IsoPlexis, Branford, CT, USA).

### Cytokine Analysis

[0355] CAR T cells were incubated with various cancer cell lines for 24-hours at a 2:1 ratio. The supernatant from these co-cultures were then assessed using MILLIPLEX (MilliporeSigma, CAT: HCYTA-60K) and run on a FLEXMAP 3D (Luminex, Austin Texas, USA).

### Cytotoxicity Assay

[0356] NK cells were cytokine starved for 24-hours prior to co-culture with target cells to reduce non-specific killing of target cells. 3,000 target (A549) cells were cocultured with effectors at indicated effector-to-target (E:T) ratios for 24-hours in a 96 well plate. Cytotoxicity was quantified by a chromogenic MTS assay measured on a plate reader (Tecan, Männedorf, Switzerland) detecting remaining viable adherent tumor cells.

### Peptide Blockade

[0357] Peptides were synthesized by the Macromolecular Synthesis Core (Harwell Center, St. Jude) purity was 97% and 95% via HPLC, respectively: Negative Control Sequence: NH₂-RQIKIWFQNRRMKWKKRSWFEAWA-COOH (SEQ ID NO: 98); Scribble PDZ Blocking Sequence: NH₂-RQIKIWFQNRRMKWKKRSWFETWV-COOH (SEQ ID NO: 99). Underlined portions of sequences are from the Antennapedia protein which has been shown to allow peptide shuttling into cells and effectively block CRTAM binding³⁶. NK cells were treated with 10 micromolar of peptides for 24-hours prior to co-culture.

### Confocal Microscopy

[0358] Ag-coated coverslip preparation and NK activation: Antigen coated coverslips were prepared using NI coverslips (Fischer Scientific: #12-545-80P), which were coated with 0.5 μg/mL of rhEphA2 (R&D Systems, Minneapolis, MN, USA: #3035-A2-100) or poly-L-lysine (Sigma: #P4707) overnight at 4° C. Then, they were washed with PBS and filled with media until NK cell seeding. 200,000 NK cells were plated onto the precoated coverslips at different time points in a cell culture incubator (37° C./5% CO₂). After activation, NK cells were washed with cold PBS and fixed with 4% paraformaldehyde (PFA, Electron microscopy sciences #15710) for 10 minutes at room temperature. Fixed cells were washed twice with PBS and the remaining PFA was inactivated with blocking buffer (PBS-2% BSA (Sigma: #A9418), 1.5M Glycine (Sigma: #G8898)) for 10 min at room temperature. Cells were permeabilized by adding permeabilization buffer (PBS, 0.2% BSA, 0.05% Saponin; Sigma: #47036) for 20 minutes at room temperature. Cells were washed twice with permeabilization buffer prior primary antibody incubation diluted in permeabilization buffer, following manufacturer instructions. All the primary antibodies were incubated at 4° C. overnight. Cells were washed with permeabilization buffer and incubated with secondary antibodies for 2-hours at room temperature. Finally, cells were washed with permeabilization buffer and PBS before to let them dry for 1-hour at room temperature. Then, coverslips were mounted onto slides using fluoromount (Thermofisher Scientific: #00-4958-02).

[0359] Antibodies and probes: Primary antibodies and probes with their dilutions: Anti-human Lamp1 (1:50) (Abcam: #ab25630), Anti-Human pZAP70 (1:50) (Cell Signaling Technology: #2701L), (Abcam: Ab6160), Phalloidin-AlexaFluor647 (1:200) (Thermofisher Scientific: #A22287), Anti-Human Cde-AlexaGluro647 (1:100) (Biolegend #300422), Anti-Human Scribble (1:100) (Cell Signaling Technology, Danvers, MA, USA #4475), Anti-WASp (1:100) (AbCam: #ab75830). Secondary antibodies with their dilutions: Anti-Rabbit AlexaFluor 488 (1:200) (Thermofisher Scientific #A32731), Anti-Mouse AlexaFluor 568 (1:200) (Thermofisher Scientific #A-11004), pERK-AF488 (1:50) (Biolegend, #675508).

[0360] Image acquisition and analysis: Images were acquired in a spinning disc confocal microscope (Zeiss Axio Observer with CSU-X spinning disc), and the processing and analysis was performed with FIJI (ImageJ) software³⁷. Single cell images shown in the figures were cropped from larger field. Image brightness and contrast was manually adjusted. To analyze lysosome and pZAP70 distribution in the immune synapse, cell borders were automatically delimited by using WEKA³⁸. To segmentate every single cell using F-actin signal as a template (CellTemp), an ellipse was automatically determined (CenterTemp) at the center of the CellTemp, which had a third of the CellTemp area. The recruitment at the center of the IS was calculated by dividing the fluorescence normalized by its area from CenterTemp and CellTemp, subtracting 1. Therefore, positive values mean that the fluorescence is enriched at the center, whereas negative values mean peripheral enrichment. NK cells were normalized to the unstimulated conditions to achieve pZAP70 and Lamp1 scores.

### Live Cell Calcium Imaging

[0361] 150,000 tumor cells were seeded onto μ-slide 8 well chambers (ibidi, Gräfelfing, Germany) (ibidi #80807) and incubated overnight at 37° C. and 5% CO₂. Tumor cells were labeled with CellBrite® Green membrane dye (Biotium Inc, Fremont, CA, USA) (1:2000) (biotum #30021) for 30 min and then washed and maintained in RPMI until image acquisition. 2×10⁶ CAR NK or T cells were resuspended in 1 mL of PBS and labeled with CAL520 (1:500) (ATTbioquest #21130) and celltrace violet (1:1000) (Thermofisher #C34557) for 1 hour and then washed and maintained in RPMI until image acquisition.

[0362] 3×10⁵ CAR immune cells were added to each well preloaded with tumor cells, and the image acquisition was initiated upon immune cell detection in the visual field. Images were acquired in a spinning disc confocal microscope (Zeiss Axio Observer with CSU-X spinning disc), using a 63× objective. The acquisition parameters were a 4D image (60 min of acquisition with 1 min of frame, and 20 μm of height with a Z-step of 1 μm).

[0363] The processing and analysis were performed with FIJI (ImageJ) software. Cell tracking and calcium influx were performed by using Trackmate plugin⁵⁹ with WEKA segmentation. All tumor and CAR immune cell interaction were recorded, and calcium influx was measured as the maximum fluorescence emitted by CAL520 signal, and it was normalized by its value before the first peak of calcium influx upon tumor interaction.

### Live Cell Synapse Imaging

[0364] Similar to the calcium flux analyses previously described, tumor cells were labeled with cell trace FarRed (Thermofisher) (1:1000) for 20 minutes. Individual fluorescent channel image stacks were isolated, and a synaptic channel was created by assessing the overlap of the tumor and immune cells through time and space. This new channel was then quantified for total synapse surface area.

### Single Cell Avidity Assay

[0365] Briefly, A549 cells were seeded into a poly-L-lysine (Sigma) coated piezo chip from LUMICKS. A549 cells adhered for 2-hours. NK cells were labelled with celltrace FarRed (ThermoFisher) at 1:1000 dilution. The A549 laden piezo chip was loaded onto the z-MOVI single cell avidity analyzer. Labelled NK cells were injected into the chip and allowed to incubate on the A549 for 5 minutes. After this time, NK cells were subjected to increasing acoustic force ramp from 0 to 1000pN over 2 minutes and 30 seconds. Individual cells were observed and the exact force requirement for detachment was recorded based on the individual cell leaving the focal plane.

### Halo Tumor Invasion Assay

[0366] Briefly, NK cells were stained with CellBrite® Green membrane dye (Biotium Inc, Fremont, CA, USA) according to manufacturer's instructions. They were then resuspended in a 4:3 vol:vol mixture of reduced-growth factor Matrigel (Corning, Glendale, AZ, USA) and complete RPMI without cytokines (halo matrix) at a concentration of 2×10⁵ effector cells per 5 uL halo matrix. The halo matrix and resuspended cells were plated manually in a ring around the periphery of a 96-well tissue-culture treated plate (Corning) Next, 1.5% rat-tail collagen I was prepared from 3% stock (ThermoFisher Scientific), IN NaOH, 10×PBS, and complete RPMI. 143B cells expressing mCherry were then resuspended in 1.5% collagen at a concentration of 1×10⁵ cells/1 uL 1.5% collagen. An E3× Repeater® pipette (Eppendorf) with a 0.1 mL Combitip advanced pipette tip was used to dispense 1 μL of resuspended 143B cells in a droplet in the center of each well. After collagen and gel solidification, complete media was then layered on top for imaging with an Incucyte S3 live-cell analysis system (Sartorius, Göttingen, Germany). Imaging was performed every hour at 4× magnification using red, green, and bright field channels. For analysis, homing of effector cells was defined as the total green area in μm² per image; the central tumoroid control was defined as percent total red area (μm²) per image normalized to hour 1 post initiation of scanning.

### In Vivo Tumor Models

[0367] Animal experiments followed a protocol approved by the St. Jude Institutional Animal Care and Use Committee. All experiments used 8- to 9-week female or male NSG mice obtained from the St. Jude NSG colony. Mice were euthanized when they reached our tumor burden limit or when they met physical euthanasia criteria (significant weight loss, signs of distress) or when recommended by St. Jude veterinary staff.

[0368] Sub-cutaneous A549 tumor model: A549 cells were injected subcutaneously at 2×10⁶ cells per 100 μL of Matrigel (Corning #356230) into the dorsal flanks of NSG mice. 10×10⁶ NK cells per mouse were injected intravenously on day 14. Tumor volume was calculated with the modified ellipsoidal equation (L×W×W)/2 every 5 days and mice were euthanized upon reaching a tumor volume limit of 3000 mm3 or for human reasons determined by St. Jude veterinarians.

[0369] Locoregional LM7 osteosarcoma model: 1×10⁶ LM7.eGFP.ffLuc expressing cells were injected intraperitoneally (i.p.) into the peritoneal cavity of NSG mice. 10×10⁶ NK cells per mouse were injected intraperitoneally on day 7. Mice were then imaged weekly. For imaging, mice were injected i.p. with 150 mg/kg of D-luciferin 5-10 minutes before imaging, anesthetized with isoflurane, and imaged with a Xenogen IVIS-200 imaging system (PerkinElmer, Waltham, MA, USA). The photons emitted from the luciferase-expressing tumor cells were quantified using Living Image software (Caliper Life Sciences). Total emitted photon flux (photons per second: p/s) was used to determine tumor burden and mice were euthanized upon reaching 1×10¹⁰ p/s.

[0370] Locoregional patient derived orthotopic xenograft models DIPG00760 and DIPG7c58: Briefly, PDOX models were implanted intracranially with a stereotactic device into the right hemisphere cerebral striatum of NSG mice in 2 μL of Matrigel (Corning). Mice were then imaged weekly for tumor establishment and treated 7 days later. 2×10⁶ T cells were injected intracranially in 2 μL of PBS at the tumor site location. DIPG007 NET AUC indicates the area under the curve from the baseline tumor flux value to day 47. Thus, negative values indicate tumor control and positive values are tumor growth.

### Used Software

[0371] IsoSpeak v2.8.1.0, GraphPad Prism v9, FlowJo v10, Fiji, Incucyte 2020A, Living Image, Oceon 1.2.1, WEKA, trackmate v7⁵⁹

### Statistical Analysis

[0372] Statistical analysis was performed using Graphpad Prism v9.4.1. Comparisons between two groups were determined by unpaired, two-tailed, Student's t-Test if deviations were significantly different, Welch's Correction was used. Three or more group comparisons were performed with One-Way ANOVA or Two-Way ANOVA with Brown-Forsythe and Welch's Correction or Uncorrected Fisher's LSD or Two-stage linear step-up procedure of Benjamini, Krieger and Yekutieli to correct for false discovery rates (FDR). The FDR method includes the p value variance to help control for false positives and determine true discoveries based on a q value threshold <0.05. Tests are indicated in each figure legend and what value is being shown along with exact values indicated in the graphs.

### Code Availability

[0373] Imaging analysis code is available in GitHub (https://github.com/Jorge-Ibanez-StJude/AutomatedImageAnalysis.git).

### REFERENCES

[0374] 1. Maude, S. L. et al. Tisagenlecleucel in Children and Young Adults with B-Cell Lymphoblastic Leukemia. N Engl J Med 378, 439-448, doi: 10.1056/NEJMoa1709866 (2018).
[0375] 2. Schuster, S. J. et al. Chimeric Antigen Receptor T Cells in Refractory B-Cell Lymphomas. N Engl J Med 377, 2545-2554, doi: 10.1056/NEJMoa1708566 (2017).
[0376] 3 Kingwell, K. CAR T therapies drive into new terrain. Nat Rev Drug Discov 16, 301-304, doi: 10.1038/nrd.2017.84 (2017).
[0377] 4. Yeh, J. H., Sidhu, S. S. & Chan, A. C. Regulation of a late phase of T cell polarity and effector functions by Crtam. Cell 132, 846-859, doi: 10.1016/j.cell.2008.01.013 (2008).
[0378] 5 Humbert, P. O., Dow, L. E. & Russell, S. M. The Scribble and Par complexes in polarity and migration: friends or foes? Trends Cell Biol 16, 622-630, doi: 10.1016/j.tcb.2006.10.005 (2006).
[0379] 6 Barreda, D. et al. The Scribble Complex PDZ Proteins in Immune Cell Polarities. J Immunol Res 2020, 5649790, doi: 10.1155/2020/5649790 (2020).
[0380] 7. Chiossone, L., Dumas, P. Y., Vienne, M. & Vivier, E. Natural killer cells and other innate lymphoid cells in cancer. Nat Rev Immunol 18, 671-688, doi: 10.1038/s41577-018-0061-z (2018).
[0381] 8. Davenport, A. J. et al. Chimeric antigen receptor T cells form nonclassical and potent immune synapses driving rapid cytotoxicity. Proc Natl Acad Sci USA 115, E2068-E2076, doi: 10.1073/pnas. 1716266115 (2018).
[0382] 9. Watanabe, K., Kuramitsu, S., Posey, A. D., Jr. & June, C. H. Expanding the Therapeutic Window for CAR T Cell Therapy in Solid Tumors: The Knowns and Unknowns of CAR T Cell Biology. Front Immunol 9, 2486, doi: 10.3389/fimmu.2018.02486 (2018).
[0383] 10. Lin, J. & Weiss, A. The tyrosine phosphatase CD148 is excluded from the immunologic synapse and down-regulates prolonged T cell signaling. J Cell Biol 162, 673-682, doi: 10.1083/jcb.200303040 (2003).
[0384] 11. Roda-Navarro, P. & Alvarez-Vallina, L. Understanding the Spatial Topology of Artificial Immunological Synapses Assembled in T Cell-Redirecting Strategies: A Major Issue in Cancer Immunotherapy. Front Cell Dev Biol 7, 370, doi: 10.3389/fcell.2019.00370 (2019).
[0385] 12. Gwalani, L. A. & Orange, J. S. Single Degranulations in NK Cells Can Mediate Target Cell Killing. J Immunol 200, 3231-3243, doi: 10.4049/jimmunol. 1701500 (2018).
[0386] 13. Lafouresse, F. et al. Stochastic asymmetric repartition of lytic machinery in dividing CD8 (+) T cells generates heterogeneous killing behavior. Elife 10, e62691, doi: 10.7554/eLife.62691 (2021).
[0387] 14. Vivier, E., Tomasello, E., Baratin, M., Walzer, T. & Ugolini, S. Functions of natural killer cells. Nat Immunol 9, 503-510, doi: 10.1038/ni1582 (2008).
[0388] 15. Nourry, C., Grant, S. G. & Borg, J. P. PDZ domain proteins: plug and play! Sci STKE 2003, RE7, doi: 10.1126/stke.2003.179.re7 (2003).
[0389] 16. Arase, N. et al. Heterotypic interaction of CRTAM with Necl2 induces cell adhesion on activated NK cells and CD8+ T cells. Int Immunol 17, 1227-1237, doi: 10.1093/intimm/dxh299 (2005).
[0390] 17. Chockley, P. J. et al. Epithelial-mesenchymal transition leads to NK cell-mediated metastasis-specific immunosurveillance in lung cancer. J Clin Invest 128, 1384-1396, doi: 10.1172/JCI97611 (2018).
[0391] 18. Yi, Z., Prinzing, B. L., Cao, F., Gottschalk, S. & Krenciute, G. Optimizing EphA2-CAR T Cells for the Adoptive Immunotherapy of Glioma. Mol Ther Methods Clin Dev 9, 70-80, doi: 10.1016/j.omtm.2018.01.009 (2018).
[0392] 19. Pasquale, E. B. Eph receptors and ephrins in cancer: bidirectional signalling and beyond. Nat Rev Cancer 10, 165-180, doi: 10.1038/nrc2806 (2010).
[0393] 20. Wykosky, J. & Debinski, W. The EphA2 receptor and ephrinAl ligand in solid tumors: function and therapeutic targeting. Mol Cancer Res 6, 1795-1806, doi: 10.1158/1541-7786.MCR-08-0244 (2008).
[0394] 21. Guillerey, C., Huntington, N. D. & Smyth, M. J. Targeting natural killer cells in cancer immunotherapy. Nat Immuno/17, 1025-1036, doi: 10.1038/ni.3518 (2016).
[0395] 22. Fauriat, C., Long, E. O., Ljunggren, H. G. & Bryceson, Y. T. Regulation of human NK-cell cytokine and chemokine production by target cell recognition. Blood 115, 2167-2176, doi: 10.1182/blood-2009-08-238469 (2010).
[0396] 23. Molgora, M., Cortez, V. S. & Colonna, M. Killing the Invaders: NK Cell Impact in Tumors and Anti-Tumor Therapy. Cancers (Basel) 13, 595, doi: 10.3390/cancers13040595 (2021).
[0397] 24. Rafei, H., Daher, M. & Rezvani, K. Chimeric antigen receptor (CAR) natural killer (NK)-cell therapy: leveraging the power of innate immunity. Br J Haematol 193, 216-230, doi: 10.1111/bjh. 17186 (2021).
[0398] 25. Lee, D. A. Cellular therapy: Adoptive immunotherapy with expanded natural killer cells. Immunol Rev 290, 85-99, doi: 10.1111/imr. 12793 (2019).
[0399] 26. Liu, E. et al. Use of CAR-Transduced Natural Killer Cells in CD19-Positive Lymphoid Tumors. N Engl J Med 382, 545-553, doi: 10.1056/NEJMoa1910607 (2020).
[0400] 27. Li, Y., Hermanson, D. L., Moriarity, B. S. & Kaufman, D. S. Human iPSC-Derived Natural Killer Cells Engineered with Chimeric Antigen Receptors Enhance Anti-tumor Activity. Cell Stem Cell 23, 181-192 e185, doi: 10.1016/j.stem.2018.06.002 (2018).
[0401] 28. Oelsner, S. et al. Continuously expanding CAR NK-92 cells display selective cytotoxicity against B-cell leukemia and lymphoma. Cytotherapy 19, 235-249, doi: 10.1016/j.jcyt.2016.10.009 (2017).
[0402] 29. Myers, J. A. & Miller, J. S. Exploring the NK cell platform for cancer immunotherapy. Nat Rev Clin Oncol 18, 85-100, doi: 10.1038/s41571-020-0426-7 (2021).
[0403] 30. Gong, Y., Klein Wolterink, R. G. J., Wang, J., Bos, G. M. J. & Germeraad, W. T. V. Chimeric antigen receptor natural killer (CAR-NK) cell design and engineering for cancer therapy. J Hematol Oncol 14, 73, doi: 10.1186/s13045-021-01083-5 (2021).
[0404] 31. Mata, M. et al. Inducible Activation of MyD88 and CD40 in CAR T Cells Results in Controllable and Potent Antitumor Activity in Preclinical Solid Tumor Models. Cancer Discov 7, 1306-1319, doi: 10.1158/2159-8290.CD-17-0263 (2017).
[0405] 32. Imai, C., Iwamoto, S. & Campana, D. Genetic modification of primary natural killer cells overcomes inhibitory signals and induces specific killing of leukemic cells. Blood 106, 376-383, doi: 10.1182/blood-2004-12-4797 (2005).
[0406] 33. Gundry, M. C. et al. Highly Efficient Genome Editing of Murine and Human Hematopoietic Progenitor Cells by CRISPR/Cas9. Cell Rep 17, 1453-1461, doi: 10.1016/j.celrep.2016.09.092 (2016).
[0407] 34. Chow, K. K. H. et al. T Cells Redirected to EphA2 for the Immunotherapy of Glioblastoma. Molecular Therapy 21, 629-637, doi: https://doi.org/10.1038/mt.2012.210 (2013).
[0408] 35. Liu, D., Paczkowski, P., Mackay, S., Ng, C. & Zhou, J. Single-Cell Multiplexed Proteomics on the IsoLight Resolves Cellular Functional Heterogeneity to Reveal Clinical Responses of Cancer Patients to Immunotherapies. Methods Mol Biol 2055, 413-431, doi: 10.1007/978-1-4939-9773-2_19 (2020).
[0409] 36. Tonikian, R. et al. A specificity map for the PDZ domain family. PLoS Biol 6, e239-e239, doi: 10.1371/journal.pbio.0060239 (2008).
[0410] 37. Schindelin, J. et al. Fiji: an open-source platform for biological-image analysis. Nat Methods 9, 676-682, doi: 10.1038/nmeth.2019 (2012).
[0411] 38. Witten, I. H., Frank, E., Hall, M. A. & Pal, C. J. Data Mining Practical Machine Learning Tools and Techniques Fourth Edition Preface. Data Mining: Practical Machine Learning Tools and Techniques, 4th Edition, Xxiii-+ (2017).
[0412] 39. Monteys A M, Hundley A A, Ranum P T, Tecedor L, Muehlmatt A, Lim E, Lukashev D, Sivasankaran R, Davidson B L. Regulated control of gene therapies by drug-induced splicing. Nature. 2021 August; 596 (7871): 291-295. doi: 10.1038/s41586-021-03770-2. Epub 2021 Jul. 28.
[0413] 40. Wu C-Y, Roybal K T, Puchner E M, Onuffer J, Lim W A. Remote control of therapeutic T cells through a small molecule-gated chimeric receptor. Science. 2015 Oct. 16; 350 (6258): aab4077. doi: 10.1126/science.aab4077. Epub 2015 Sep. 24.
[0414] 41. Juillerat A, Tkach F, Busser B W, Temburni S, Valton J, Duclert A, Poirot L, Depil S, and Duchateau P. Modulation of chimeric antigen receptor surface expression by a small molecule switch. BMC Biotechnol. 2019; 19:44. Published online 2019 Jul. 3. doi: 10.1186/s12896-019-0537-3.
[0415] 42. Carbonneau S, Sharma S, Peng L, Rajan V, Hainzl D, Henault M, Yang C, Hale J, Shulok J, Tallarico J, Porter J, Brogdon J L, Dranoff G, Bradner J E, Hild M, and Guimaraes C P. An IMID-inducible degron provides reversible regulation for chimeric antigen receptor expression and activity. Cell Chemical Biology. Volume 28, Issue 6, 17 Jun. 2021, Pages 802-812.e6
[0416] 43. Jan M, Scarfò I, Larson R C, Walker A, Schmidts A, Guirguis A A, Gasser J A, Słabicki M, Bouffard A B, Castano A P, Kann M C, Cabral M L, Tepper A, Grinshpun D E, Sperling A S, Kyung T, Sievers Q L, Birnbaum M E, Maus M V, Ebert B L. Reversible ON- and OFF-switch chimeric antigen receptors controlled by lenalidomide. Sci Transl Med. 2021 Jan. 6; 13 (575): eabb6295. doi: 10.1126/scitranslmed.abb6295.
[0417] 44. Lanier, L. L., Chang, C., Spits, H. & Phillips, J. H. Expression of cytoplasmic CD3 epsilon proteins in activated human adult natural killer (NK) cells and CD3 gamma, delta, epsilon complexes in fetal NK cells. Implications for the relationship of NK and T lymphocytes. J Immunol 149, 1876-1880 (1992).
[0418] 45. Zigmond, S. H. How WASP regulates actin polymerization. J Cell Biol 150, F117-120, doi: 10.1083/jcb.150.6.f117 (2000).
[0419] 46. Molon, B., Liboni, C. & Viola, A. CD28 and chemokine receptors: Signalling amplifiers at the immunological synapse. Front Immunol 13, 938004, doi: 10.3389/fimmu.2022.938004 (2022).
[0420] 47. Nguyen, P. et al. Route of 41BB/41BBL Costimulation Determines Effector Function of B7-H3-CAR.CD28zeta T Cells. Mol Ther Oncolytics 18, 202-214, doi: 10.1016/j.omto.2020.06.018 (2020).
[0421] 48. Majzner, R. G. et al. CAR T Cells Targeting B7-H3, a Pan-Cancer Antigen, Demonstrate Potent Preclinical Activity Against Pediatric Solid Tumors and Brain Tumors. Clin Cancer Res 25, 2560-2574, doi: 10.1158/1078-0432.CCR-18-0432 (2019).
[0422] 49. Larson, R. C. et al. CAR T cell killing requires the IFNγR pathway in solid but not liquid tumours. Nature 604, 563-570, doi: 10.1038/s41586-022-04585-5 (2022)
[0423] 50. Majzner, R. G. & Mackall, C. L. Tumor Antigen Escape from CAR T-cell Therapy. Cancer Discov 8, 1219-1226, doi: 10.1158/2159-8290.Cd-18-0442 (2018).
[0424] 51. Wagner, J., Wickman, E., DeRenzo, C. & Gottschalk, S. CAR T Cell Therapy for Solid Tumors: Bright Future or Dark Reality? Mol Ther 28, 2320-2339, doi: 10.1016/j.ymthe.2020.09.015 (2020).
[0425] 52. Yu, W. L. & Hua, Z. C. Chimeric Antigen Receptor T-cell (CAR T) Therapy for Hematologic and Solid Malignancies: Efficacy and Safety-A Systematic Review with Meta-Analysis. Cancers (Basel) 11, doi: 10.3390/cancers11010047 (2019).
[0426] 53. Tong, C. et al. Optimized tandem CD19/CD20 CAR-engineered T cells in refractory/relapsed B-cell lymphoma. 136, 1632-1644, Blood doi: 10.1182/blood.2020005278 (2020).
[0427] 54. Hegde, M. et al. Tandem CAR T cells targeting HER2 and IL13Ralpha2 mitigate tumor antigen escape. J Clin Invest 126, 3036-3052, doi: 10.1172/JCI83416 (2016).
[0428] 55. Majzner, R. G. et al. Tuning the Antigen Density Requirement for CAR T-cell Activity. Cancer Discov 10, 702-723, doi: 10.1158/2159-8290.CD-19-0945 (2020).
[0429] 56. Xiong, W. et al. Immunological Synapse Predicts Effectiveness of Chimeric Antigen Receptor Cells. Mol Ther 26, 963-975, doi: 10.1016/j.ymthe.2018.01.020 (2018).
[0430] 57. Taylor, K. R. et al. Recurrent activating ACVR1 mutations in diffuse intrinsic pontine glioma. Nat Genet 46, 457-461, doi: 10.1038/ng.2925 (2014).
[0431] 58. He, C. et al. Patient-derived models recapitulate heterogeneity of molecular signatures and drug response in pediatric high-grade glioma. Nat Commun 12, 4089, doi: 10.1038/s41467-021-24168-8 (2021).
[0432] 59. Ershov, D. et al. Bringing TrackMate into the era of machine-learning and deep-learning. bioRxiv, 2021.2009.2003.458852, doi: 10.1101/2021.09.03.458852 (2021).
[0433] 60. Haydar, D. et al. Cell-surface antigen profiling of pediatric brain tumors: B7-H3 is consistently expressed and can be targeted via local or systemic CAR T-cell delivery. Neuro Oncol 23, 999-1011, doi: 10.1093/neuonc/noaa278 (2021).

[0434] The present invention is not to be limited in scope by the specific embodiments described herein. Indeed, various modifications of the invention in addition to those described herein will become apparent to those skilled in the art from the foregoing description. Such modifications are intended to fall within the scope of the appended claims.

[0435] All patents, applications, publications, test methods, literature, and other materials cited herein are hereby incorporated by reference in their entirety as if physically present in this specification.

1. A polynucleotide encoding a chimeric antigen receptor (CAR) comprising
a) an extracellular domain,
b) a transmembrane domain, and
c) a cytoplasmic domain comprising a signaling domain and an anchoring domain which binds to a cell polarity protein.

2. The polynucleotide of claim 1, wherein the cell polarity protein comprises a Postsynaptic density-95, Discs large, and Zona occludens 1 (PDZ) domain.

3. The polynucleotide of claim 1, wherein the anchoring domain comprises a PDZ binding motif (PDZbm).

4. (canceled)

5. The polynucleotide of claim 3, wherein the PDZbm binds to SCRIB (or Scribble), or the PDZbm is derived from Cytotoxic and Regulatory T cell Associated Molecule (CRTAM).

6.-7. (canceled)

8. The polynucleotide of claim 5, wherein the PDZbm comprises the amino acid sequence of ESIV (SEQ ID NO: 1); or the nucleotide sequence encoding the PDZbm comprises gagagcatcgtg (SEQ ID NO: 2).

9. (canceled)

10. The polynucleotide of claim 8, wherein the PDZbm comprises the amino acid sequence of
(SEQ ID NO: 3)
HPMRCMNYITKLYSEAKTKRKENVQHSKLEEKHIQVPESIV;
or the nucleotide sequence encoding the PDZbm
comprises
(SEQ ID NO: 4)
caccccatgcggtgcatgaactacatcaccaagctgtactccgaggccaa
gaccaagcggaaagagaacgtccagcacagcaagctggaagagaagcaca
ttcaggtgcccgagagcatcgtgtga.

11. (canceled)

12. The polynucleotide of claim 1, wherein the anchoring domain is located at the C-terminal position of the CAR.

13. The polynucleotide of claim 1, wherein the extracellular domain comprises an antigen-binding moiety.

14. The polynucleotide of claim 13, wherein the antigen-binding moiety is an antibody or antibody fragment, a ligand, or a peptide sequence.

15. The polynucleotide of claim 14, wherein the antigen-binding moiety is a single chain variable fragment (scFv).

16. (canceled)

17. The polynucleotide of claim 13, wherein the antigen-binding moiety binds to a tumor antigen, an antigen of extracellular matrix, an antigen present on cells within the tumor microenvironment, a tissue-specific antigen, an autoimmune antigen, or an infectious antigen.

18. The polynucleotide of claim 17, wherein the antigen-binding moiety binds ephrin type-A receptor 2 (EphA2) or B7 homolog 3 (B7-H3).

19. The polynucleotide of claim 1, wherein the transmembrane domain is derived from CD8α, CD28, CD8, CD4, CD3ζ, CD40, CD134 (OX-40), NKG2A, NKG2C, NKG2D, NKG2E, or CD7.

20. The polynucleotide of claim 19, wherein the transmembrane domain is derived from CD28.

21. The polynucleotide of claim 1, wherein the extracellular domain further comprises a hinge domain between the antigen-binding moiety and the transmembrane domain.

22. The polynucleotide of claim 21, wherein the hinge domain is derived from CD8α stalk, CD28, or an IgG.

23. The polynucleotide of claim 22, wherein the hinge domain is a short hinge domain derived from IgG1, IgG2, IgG3, or IgG4.

24. The polynucleotide of claim 1, wherein the signaling domain is derived from CD3ζ, DAP10, DAP12, Fc epsilon receptor I γ chain (FCER1G), CD3δ, CD3ε, CD3γ, CD226, NKG2D, or CD79A.

25. The polynucleotide of claim 24, wherein the signaling domain is derived from CD3ζ.

26. The polynucleotide of claim 1, wherein the cytoplasmic domain further comprises one or more costimulatory domains.

27. The polynucleotide of claim 26, wherein the one or more costimulatory domains are derived from CD28, 4-1BB, CD27, CD40, CD134, CD226, CD79A, ICOS, or MyD88, or any combination thereof.

28. The polynucleotide of claim 27, wherein the cytoplasmic domain comprises a CD28 costimulatory domain.

29.-36. (canceled)

37. A chimeric antigen receptor (CAR) encoded by the polynucleotide of claim 1.

38.-39. (canceled)

40. A recombinant vector comprising the polynucleotide of claim 1.

41.-45. (canceled)

46. An isolated host cell comprising the polynucleotide of claim 1, a recombinant vector comprising the polynucleotide, or a chimeric antigen receptor (CAR) encoded by the polynucleotide.

47.-62. (canceled)

63. A pharmaceutical composition comprising the isolated host cell of claim 46 and a pharmaceutically acceptable carrier and/or excipient.

64. A method of generating an isolated host cell expressing a chimeric antigen receptor (CAR), said method comprising genetically modifying the host cell with the polynucleotide of claim 1, or a recombinant vector comprising the polynucleotide.

65.-68. (canceled)

69. A method for treating a disease in a subject in need thereof, said method comprising administering to the subject a therapeutically effective amount of the host cell(s) of claim 46, a pharmaceutical composition comprising the host cell(s) and a pharmaceutically acceptable carrier and/or excipient.

70.-72. (canceled)

73. The polynucleotide of claim 1, wherein the cytoplasmic domain comprises a CD28 costimulatory domain, a CD3ζ signaling domain, and a PDZbm.

74. A polynucleotide encoding a chimeric antigen receptor (CAR), the improvement comprising said CAR comprises a cytoplasmic domain comprising a signaling domain and an anchoring domain which binds to a cell polarity protein.

The application's sequence listing, which the Patent Office published only in electronic form, follows.

SEQUENCE LISTING (23127 sequences)

SEQ ID NO: 1 - protein, 4 aa, Homo sapiens
ESIV

SEQ ID NO: 2 - DNA, 12 bp, Homo sapiens
  source 1..12: mol_type = genomic DNA
gagagcatcgtg

SEQ ID NO: 3 - protein, 41 aa, Homo sapiens
HPMRCMNYITKLYSEAKTKRKENVQHSKLEEKHIQVPESIV

SEQ ID NO: 4 - DNA, 126 bp, Homo sapiens
  source 1..126: mol_type = genomic DNA
caccccatgcggtgcatgaactacatcaccaagctgtactccgaggccaagaccaagcggaaagagaacgtccagcacagcaagctggaagagaagcacattcaggtgcccgagagcatcgtgtga

SEQ ID NO: 5 - protein, 19 aa, synthetic construct
MDWIWRILFLVGAATGAHS

SEQ ID NO: 6 - DNA, 57 bp, synthetic construct
  source 1..57: mol_type = other DNA
atggactggatctggcgcatcctcttcctcgtcggcgctgctaccggcgctcattct

SEQ ID NO: 7 - DNA, 57 bp, synthetic construct
  source 1..57: mol_type = other DNA
atggactggatctggcgcatcctgtttcttgtgggagccgccacaggcgcccattct

SEQ ID NO: 8 - protein, 21 aa, synthetic construct
MALPVTALLLPLALLLHAARP

SEQ ID NO: 9 - DNA, 63 bp, synthetic construct
  source 1..63: mol_type = other DNA
atggccttaccagtgaccgccttgctcctgccgctggccttgctgctccacgccgccaggccg

SEQ ID NO: 10 - protein, 255 aa, synthetic construct
MDWIWRILFLVGAATGAHSQVQLLESGGGLVQPGGSLRLSCAASGFTFSSYTMSWVRQAPGQALEWMGTISSGGTYTYYPDSVKGRFTISRDNAKNSLYLQMNSLRAEDTAVYYCAREAIFTYWGRGTLVTSSGGGGSGGGGSGGGGSDIQLTQSPSSLSASVGDRVTITCKASQDINNYLSWYQQKPGQAPRLLIYRANRLVDGVPDRFSGSGYGTDFTLTINNIESEDAAYYFCLKYDVFPYTFGQGTKVEIK

SEQ ID NO: 11 - DNA, 765 bp, synthetic construct
  source 1..765: mol_type = other DNA
atggactggatctggcggattctgttcctcgtgggagccgccacaggcgctcactcacaggtgcagctgctggaatctggcggcggactggtgcagcctggcggcagcctgagactgagctgcgccgccagcggcttcaccttcagcagctacaccatgagctgggtccggcaggctcctggacaggccctggaatggatgggcaccatcagcagcggcggcacctacacctactaccccgacagcgtgaagggccggttcaccatcagccgggacaacgccaagaacagcctgtacctgcagatgaacagcctgagagccgaggacacagccgtgtactactgcgccagagaggccatcttcacctactggggcagaggcaccctggtcacaagcagcggaggcggaggaagtggagggggaggatcaggcggcggaggcagcgatatccagctgacccagagccctagcagcctgagcgccagcgtgggcgacagagtgaccatcacatgcaaggccagccaggacatcaacaactacctgagctggtatcagcagaagcccggccaggcccccagactgctgatctaccgggccaacagactggtggacggcgtgcccgatagattcagcggcagcggctacggcaccgacttcaccctgaccatcaacaacatcgagtccgaggacgccgcctactacttctgcctgaagtacgacgtgttcccctacaccttcggccagggcaccaaggtggagatcaag

SEQ ID NO: 12 - protein, 15 aa, synthetic construct
GGGGSGGGGSGGGGS

SEQ ID NO: 13 - DNA, 45 bp, synthetic construct
  source 1..45: mol_type = other DNA
ggcggcggcggatcaggcggcggaggaagcggaggtggggggtcc

SEQ ID NO: 14 - DNA, 45 bp, synthetic construct
  source 1..45: mol_type = other DNA
ggaggcggaggttcaggtggcggaggaagtggcggcggaggatca

SEQ ID NO: 15 - protein, 5 aa, synthetic construct
GGGGS

SEQ ID NO: 16 - DNA, 15 bp, synthetic construct
  source 1..15: mol_type = other DNA
ggaggcggaggttca

SEQ ID NO: 17 - protein, 10 aa, synthetic construct
GGGGSGGGGS

SEQ ID NO: 18 - protein, 20 aa, synthetic construct
GGGGSGGGGSGGGGSGGGGS

SEQ ID NO: 19 - protein, 18 aa, synthetic construct
KESGSVSSEQLAQFRSLD

SEQ ID NO: 20 - protein, 14 aa, synthetic construct
EGKSSGSGSESKST

SEQ ID NO: 21 - protein, 15 aa, synthetic construct
EGKSSGSGSESKSTQ

SEQ ID NO: 22 - protein, 14 aa, synthetic construct
GSTSGSGKSSEGKG

SEQ ID NO: 23 - protein, 25 aa, synthetic construct
SSADDAKKDDAKKDDAKKDDAKKDG

SEQ ID NO: 24 - protein, 14 aa, synthetic construct
EGKSSGSGSESKVD

SEQ ID NO: 25 - protein, 16 aa, synthetic construct
ESGSVSSEELAFRSLD

SEQ ID NO: 26 - protein, 20 aa, synthetic construct
DLEPKSCDKTHTCPPCPDPK

SEQ ID NO: 27 - DNA, 60 bp, synthetic construct
  source 1..60: mol_type = other DNA
gatctcgagcccaaatcttgtgacaaaactcacacatgcccaccgtgcccggatcccaag

SEQ ID NO: 28 - protein, 231 aa, synthetic construct
ESKYGPPCPSCPAPEFEGGPSVFLFPPKPKDTLMISRTPEVTCVVVDVSQEDPEVQFNWYVDGVEVHNAKTKPREEQFQSTYRVVSVLTVLHQDWLNGKEYKCKVSNKGLPSSIEKTISKAKGQPREPQVYTLPPSQEEMTKNQVSLTCLVKGFYPSDIAVEWESNGQPENNYKTTPPVLDSDGSFFLYSRLTVDKSRWQEGNVFSCSVMHEALHNHYTQKSLSLSLGKGS

SEQ ID NO: 29 - DNA, 693 bp, synthetic construct
  source 1..693: mol_type = other DNA
gagtctaagtacggccctccttgtcctagctgccccgctcctgaatttgaaggcggcccttccgtgttcctgtttcctccaaagcctaaggacaccctgatgatcagcagaacccctgaagtgacctgcgtggtggtggacgtgtcccaagaggatcctgaggtgcagttcaattggtacgtggacggcgtggaagtgcacaacgccaagaccaagcctagagaggaacagttccagagcacctacagagtggtgtccgtgctgacagtgctgcaccaggattggctgaacggcaaagagtacaagtgcaaggtgtccaacaagggcctgcctagcagcatcgagaaaaccatcagcaaggccaagggccagccaagagaaccccaggtgtacacactgcctccaagccaagaggaaatgaccaagaaccaggtgtccctgacctgcctggtcaagggcttctacccttccgatatcgccgtggaatgggagagcaatggccagcctgagaacaactacaagaccacacctcctgtgctggacagcgacggctcattcttcctgtacagcagactgaccgtggacaagagcagatggcaagagggcaacgtgttcagctgcagcgtgatgcacgaggccctgcacaaccactacacccagaagtctctgagcctgagcctcggcaagggctcc

SEQ ID NO: 30 - protein, 45 aa, synthetic construct
TTTPAPRPPTPAPTIASQPLSLRPEACRPAAGGAVHTRGLDFACD

SEQ ID NO: 31 - DNA, 135 bp, synthetic construct
  source 1..135: mol_type = other DNA
accaccacaccagctcctcggcctccaactcctgctcctacaatagccagccagcctctgtctctgaggcccgaagcatgcagacctgctgctggcggagccgtgcatacaagaggactggatttcgcctgcgac

SEQ ID NO: 32 - protein, 39 aa, synthetic construct
IEVMYPPPYLDNEKSNGTIIHVKGKHLCPSPLFPGPSKP

SEQ ID NO: 33 - DNA, 116 bp, synthetic construct
  source 1..116: mol_type = other DNA
atcgaagtgatgtacccgcctccttacctggacaacgagaagtccaacggcaccatcatccacgtgaagggaaagcacctgtgtccttctccactgttccccggacctagcaagcc

SEQ ID NO: 34 - protein, 15 aa, synthetic construct
EPKSCDKTHTCPPCP

SEQ ID NO: 35 - protein, 12 aa, synthetic construct
ERKCCVECPPCP

SEQ ID NO: 36 - protein, 32 aa, synthetic construct
ELKTPLGDTTHTCPRCPEPKSCDTPPPCPRCP

SEQ ID NO: 37 - protein, 12 aa, synthetic construct
ESKYGPPCPSCP

SEQ ID NO: 38 - protein, 36 aa, synthetic construct
FWVLVVVGGVLACYSLLVTVAFIIFWVRSKRSRLLH

SEQ ID NO: 39 - DNA, 108 bp, synthetic construct
  source 1..108: mol_type = other DNA
ttctgggtgctggtggtcgtgggcggagtgctggcctgttacagcctgctcgtgaccgtggccttcatcatcttttgggtgcgcagcaagcggagccggctgctgcac

SEQ ID NO: 40 - protein, 27 aa, synthetic construct
FWVLVVVGGVLACYSLLVTVAFIIFWV

SEQ ID NO: 41 - DNA, 81 bp, synthetic construct
  source 1..81: mol_type = other DNA
ttctgggtgctggtggtcgtgggcggagtgctggcctgttacagcctgctcgtgaccgtggccttcatcatcttttgggtg

SEQ ID NO: 42 - protein, 24 aa, synthetic construct
IYIWAPLAGTCGVLLLSLVITLYC

SEQ ID NO: 43 - DNA, 72 bp, synthetic construct
  source 1..72: mol_type = other DNA
atctacatctgggcccctctggctggaacatgtggcgttctgctgctgagcctggtcatcaccctgtactgc

SEQ ID NO: 44 - protein, 21 aa, synthetic construct
LCYLLDGILFIYGVILTALFL

SEQ ID NO: 45 - DNA, 63 bp, synthetic construct
  source 1..63: mol_type = other DNA
ctgtgctacctgctggacggcatcctgttcatctacggcgtgatcctgaccgccctgttcctg

SEQ ID NO: 46 - protein, 41 aa, synthetic construct
RSKRSRLLHSDYMNMTPRRPGPTRKHYQPYAPPRDFAAYRS

SEQ ID NO: 47 - DNA, 123 bp, synthetic construct
  source 1..123: mol_type = other DNA
cgcagcaagcggagccggctgctgcacagcgactacatgaacatgacccccagacggcctggccccaccagaaagcactaccagccttacgcccctcccagagacttcgccgcctaccggtcc

SEQ ID NO: 48 - protein, 42 aa, synthetic construct
KRGRKKLLYIFKQPFMRPVQTTQEEDGCSCRFPEEEEGGCEL

SEQ ID NO: 49 - DNA, 126 bp, synthetic construct
  source 1..126: mol_type = other DNA
aaacggggcagaaagaaactcctgtatatattcaaacaaccatttatgagaccagtacaaactactcaagaggaagatggctgtagctgccgatttccagaagaagaagaaggaggatgtgaactg

SEQ ID NO: 50 - protein, 36 aa, synthetic construct
RDQRLPPDAHKPPGGGSFRTPIQEEQADAHSTLAKI

SEQ ID NO: 51 - DNA, 108 bp, synthetic construct
  source 1..108: mol_type = other DNA
agggaccagaggctgccccccgatgcccacaagccccctgggggaggcagtttccggacccccatccaagaggagcaggccgacgcccactccaccctggccaagatc

SEQ ID NO: 52 - protein, 171 aa, synthetic construct
AAGGPGAGSAAPVSSTSSLPLAALNMRVRRRLSLFLNVRTQVAADWTALAEEMDFEYLEIRQLETQADPTGRLLDAWQGRPGASVGRLLELLTKLGRDDVLLELGPSIEEDCQKYILKQQQEEAEKPLQVAAVDSSVPRTAELAGITTLDDPLGHMPERFDAFICYCPSDI

SEQ ID NO: 53 - DNA, 513 bp, synthetic construct
  source 1..513: mol_type = other DNA
gctgctggcggacctggcgccggatctgctgctcctgtgtctagcacaagcagcctgcctctggccgccctgaacatgagagtgcggagaaggctgagcctgttcctgaacgtgcggacacaggtggccgccgattggacagccctggccgaggaaatggacttcgagtacctggaaatccggcagctggaaacccaggccgaccctacaggcagactgctggatgcttggcagggcagaccaggcgcttctgtgggaaggctgctggaactgctgaccaagctgggcagggacgacgtgctgctggaactgggccctagcatcgaagaggactgccagaagtacatcctgaagcagcagcaggaagaggccgagaagcctctgcaggtggcagccgtggatagcagcgtgccaagaacagccgagctggccggcatcaccaccctggatgatcctctgggccacatgcccgagagattcgacgccttcatctgctactgccccagcgacatc

SEQ ID NO: 54 - protein, 172 aa, synthetic construct
MAAGGPGAGSAAPVSSTSSLPLAALNMRVRRRLSLFLNVRTQVAADWTALAEEMDFEYLEIRQLETQADPTGRLLDAWQGRPGASVGRLLDLLTKLGRDDVLLELGPSIEEDCQKYILKQQQEEAEKPLQVAAVDSSVPRTAELAGITTLDDPLGHMPERFDAFICYCPSDI

SEQ ID NO: 55 - DNA, 516 bp, synthetic construct
  source 1..516: mol_type = other DNA
atggccgctgggggcccaggcgccggatcagctgctcccgtatcttctacttcttctttgccgctggctgctctgaacatgcgcgtgagaagacgcctctccctgttccttaacgttcgcacacaagtcgctgccgattggaccgcccttgccgaagaaatggactttgaatacctggaaattagacaacttgaaacacaggccgaccccactggcagactcctggacgcatggcagggaagacctggtgcaagcgttggacggctcctggatctcctgacaaaactgggacgcgacgacgtactgcttgaactcggacctagcattgaagaagactgccaaaaatatatcctgaaacaacaacaagaagaagccgaaaaacctctccaagtcgcagcagtggactcatcagtaccccgaacagctgagcttgctgggattactacactcgacgacccactcggacatatgcctgaaagattcgacgctttcatttgctattgcccctctgacata

SEQ ID NO: 56 - protein, 171 aa, synthetic construct
AAGGPGAGSAAPVSSTSSLPLAALNMRVRRRLSLFLNVRTQVAADWTALAEEMDFEYLEIRQLETQADPTGRLLDAWQGRPGASVGRLLDLLTKLGRDDVLLELGPSIEEDCQKYILKQQQEEAEKPLQVAAVDSSVPRTAELAGITTLDDPLGHMPERFDAFICYCPSDI

SEQ ID NO: 57 - DNA, 513 bp, synthetic construct
  source 1..513: mol_type = other DNA
gccgctgggggcccaggcgccggatcagctgctcccgtatcttctacttcttctttgccgctggctgctctgaacatgcgcgtgagaagacgcctctccctgttccttaacgttcgcacacaagtcgctgccgattggaccgcccttgccgaagaaatggactttgaatacctggaaattagacaacttgaaacacaggccgaccccactggcagactcctggacgcatggcagggaagacctggtgcaagcgttggacggctcctggatctcctgacaaaactgggacgcgacgacgtactgcttgaactcggacctagcattgaagaagactgccaaaaatatatcctgaaacaacaacaagaagaagccgaaaaacctctccaagtcgcagcagtggactcatcagtaccccgaacagctgagcttgctgggattactacactcgacgacccactcggacatatgcctgaaagattcgacgctttcatttgctattgcccctctgacata

SEQ ID NO: 58 - protein, 62 aa, synthetic construct
KKVAKKPTNKAPHPKQEPQEINFPDDLPGSNTAAPVQETLHGCQPVTQEDGKESRISVQERQ

SEQ ID NO: 59 - DNA, 186 bp, synthetic construct
  source 1..186: mol_type = other DNA
aagaaggtggccaagaagcccaccaacaaggccccccaccccaagcaggaaccccaggaaatcaacttccccgacgacctgcccggcagcaatactgctgcacccgtgcaggaaaccctgcacggctgtcagcctgtgacccaggaagatggcaaagaaagccggatctctgtgcaggaacgccag

SEQ ID NO: 60 - protein, 112 aa, synthetic construct
RVKFSRSADAPAYQQGQNQLYNELNLGRREEYDVLDKRRGRDPEMGGKPRRKNPQEGLYNELQKDKMAEAYSEIGMKGERRRGKGHDGLYQGLSTATKDTYDALHMQALPPR

SEQ ID NO: 61 - DNA, 336 bp, synthetic construct
  source 1..336: mol_type = other DNA
agagtgaagttcagcagaagcgccgacgcccctgcctatcagcagggccagaaccagctgtacaacgagctgaacctgggcagacgggaagagtacgacgtgctggacaagcggagaggcagggaccctgagatgggcggcaagcccagaagaaagaacccccaggaaggcctgtataacgaactgcagaaagacaagatggccgaggcctacagcgagatcggcatgaagggcgagcggagaagaggcaagggccacgatggcctgtaccagggactgagcaccgccaccaaggacacctacgacgccctgcacatgcaggccctgcctccaaga

SEQ ID NO: 62 - protein, 116 aa, synthetic construct
RVKFSRSADAPAYQQGQNQLYNELNLGRREEYDVLDKRRGRDPEMGGKPRRKNPQEGLYNELQKDKMAEAYSEIGMKGERRRGKGHDGLYQGLSTATKDTYDALHMQALPPRASRA

SEQ ID NO: 63 - DNA, 348 bp, synthetic construct
  source 1..348: mol_type = other DNA
agagtgaagttcagcagaagcgccgacgcccctgcctatcagcagggccagaaccagctgtacaacgagctgaacctgggcagacgggaagagtacgacgtgctggacaagcggagaggcagggaccctgagatgggcggcaagcccagaagaaagaacccccaggaaggcctgtataacgaactgcagaaagacaagatggccgaggcctacagcgagatcggcatgaagggcgagcggagaagaggcaagggccacgatggcctgtaccagggactgagcaccgccaccaaggacacctacgacgccctgcacatgcaggccctgcctccaagagcctctagagcc

SEQ ID NO: 64 - protein, 18 aa, Thosea asigna virus
EGRGSLLTCGDVEENPGP

SEQ ID NO: 65 - DNA, 54 bp, Thosea asigna virus
  source 1..54: mol_type = genomic DNA
gagggcagaggcagcctgctgacatgtggcgacgtggaagagaacccaggcccc

SEQ ID NO: 66 - protein, 19 aa, Thosea asigna virus
AEGRGSLLTCGDVEENPGP

SEQ ID NO: 67 - protein, 21 aa, Thosea asigna virus
GSGEGRGSLLTCGDVEENPGP

SEQ ID NO: 68 - protein, 63 aa, Foot-and-mouth disease virus
GSGSRVTELLYRMKRAETYCPRPLLAIHPTEARHKQKIVAPVKQLLNFDLLKLAGDVESNPGP

SEQ ID NO: 69 - protein, 19 aa, Amphimedon sp.
LLCFLLLLLSGDVELNPGP

SEQ ID NO: 70 - protein, 20 aa, Amphimedon sp.
HHFMFLLLLLAGDIELNPGP

SEQ ID NO: 71 - protein, 20 aa, Saccoglossus kowalevskii
WFLVLLSFILSGDIEVNPGP

SEQ ID NO: 72 - protein, 20 aa, Branchiostoma floridae
KNCAMYMLLLSGDVETNPGP

SEQ ID NO: 73 - protein, 20 aa, Branchiostoma floridae
MVISQLMLKLAGDVEENPGP

SEQ ID NO: 74 - protein, 22 aa, Teschovirus A
GSGATNFSLLKQAGDVEENPGP

SEQ ID NO: 75 - protein, 23 aa, Equine Rhinitis A Virus
GSGQCTNYALLKLAGDVESNPGP

SEQ ID NO: 76 - protein, 8 aa, synthetic construct
DXEXNPGP

SEQ ID NO: 77 - protein, 333 aa, synthetic construct
MPPPRLLFFLLFLTPMEVRPEEPLVVKVEEGDNAVLQCLKGTSDGPTQQLTWSRESPLKPFLKLSLGLPGLGIHMRPLAIWLFIFNVSQQMGGFYLCQPGPPSEKAWQPGWTVNVEGSGELFRWNVSDLGGLGCGLKNRSSEGPSSPSGKLMSPKLYVWAKDRPEIWEGEPPCLPPRDSLNQSLSQDLTMAPGSTLWLSCGVPPDSVSRGPLSWTHVHPKGPKSLLSLELKDDRPARDMWVMETGLLLPRATAQDAGKYYCHRGNLTMSFHLEITARPVLWHWLLRTGGWKVSAVTLAYLIFCLCSLVGILHLQRALVLRRKRKRMTDPTRRF

SEQ ID NO: 78 - DNA, 999 bp, synthetic construct
  source 1..999: mol_type = other DNA
atgcctccccccagactgctgttcttcctgctgttcctgacccctatggaagtgcggcccgaggaacccctggtcgtgaaagtggaagagggcgacaacgccgtgctgcagtgtctgaagggcacctccgatggccctacccagcagctgacctggtccagagagagccccctgaagcccttcctgaagctgtctctgggcctgcctggcctgggcatccatatgaggccactggccatctggctgttcatcttcaacgtgtcccagcagatgggaggcttctacctgtgccagcctggcccaccttctgagaaggcttggcagcctggctggaccgtgaacgtggaaggatctggcgagctgttccggtggaacgtgtccgatctgggcggcctgggatgcggcctgaagaacagatctagcgagggccccagcagccccagcggcaaactgatgagccccaagctgtacgtgtgggccaaggacagacccgagatttgggagggcgagcccccttgcctgccccctagagatagcctgaaccagagcctgagccaggacctgacaatggcccctggcagcacactgtggctgagctgtggcgtgccacccgactctgtgtctagaggccctctgagctggacccacgtgcaccctaagggccctaagagcctgctgtccctggaactgaaggacgacaggcccgccagagatatgtgggtcatggaaaccggcctgctgctgcctagagccacagcccaggatgccggcaagtactactgccacagaggcaacctgaccatgagcttccacctggaaatcaccgccagacccgtgctgtggcactggctgctgagaaccggcggatggaaagtgtccgccgtgactctggcctacctgatcttctgcctgtgctccctcgtgggcatcctgcatctgcagagggctctggtgctgcggcggaagcggaagagaatgaccgaccctacccggcggttc

SEQ ID NO: 79 - DNA, 1002 bp, synthetic construct
  source 1..1002: mol_type = other DNA
atgcctccccccagactgctgttcttcctgctgttcctgacccctatggaagtgcggcccgaggaacccctggtcgtgaaagtggaagagggcgacaacgccgtgctgcagtgtctgaagggcacctccgatggccctacccagcagctgacctggtccagagagagccccctgaagcccttcctgaagctgtctctgggcctgcctggcctgggcatccatatgaggccactggccatctggctgttcatcttcaacgtgtcccagcagatgggaggcttctacctgtgccagcctggcccaccttctgagaaggcttggcagcctggctggaccgtgaacgtggaaggatctggcgagctgttccggtggaacgtgtccgatctgggcggcctgggatgcggcctgaagaacagatctagcgagggccccagcagccccagcggcaaactgatgagccccaagctgtacgtgtgggccaaggacagacccgagatttgggagggcgagcccccttgcctgccccctagagatagcctgaaccagagcctgagccaggacctgacaatggcccctggcagcacactgtggctgagctgtggcgtgccacccgactctgtgtctagaggccctctgagctggacccacgtgcaccctaagggccctaagagcctgctgtccctggaactgaaggacgacaggcccgccagagatatgtgggtcatggaaaccggcctgctgctgcctagagccacagcccaggatgccggcaagtactactgccacagaggcaacctgaccatgagcttccacctggaaatcaccgccagacccgtgctgtggcactggctgctgagaaccggcggatggaaagtgtccgccgtgactctggcctacctgatcttctgcctgtgctccctcgtgggcatcctgcatctgcagagggctctggtgctgcggcggaagcggaagagaatgaccgaccctacccggcggttctaa

SEQ ID NO: 80 - protein, 42 aa, Homo sapiens
AHPMRCMNYITKLYSEAKTKRKENVQHSKLEEKHIQVPESIV

SEQ ID NO: 81 - DNA, 129 bp, Homo sapiens
  source 1..129: mol_type = genomic DNA
gcccaccccatgcggtgcatgaactacatcaccaagctgtactccgaggccaagaccaagcggaaagagaacgtccagcacagcaagctggaagagaagcacattcaggtgcccgagagcatcgtgtga

SEQ ID NO: 82 - protein, 275 aa, synthetic construct
MDWIWRILFLVGAATGAHSQVQLLESGGGLVQPGGSLRLSCAASGFTFSSYTMSWVRQAPGQALEWMGTISSGGTYTYYPDSVKGRFTISRDNAKNSLYLQMNSLRAEDTAVYYCAREAIFTYWGRGTLVTSSGGGGSGGGGSGGGGSDIQLTQSPSSLSASVGDRVTITCKASQDINNYLSWYQQKPGQAPRLLIYRANRLVDGVPDRFSGSGYGTDFTLTINNIESEDAAYYFCLKYDVFPYTFGQGTKVEIKDLEPKSCDKTHTCPPCPDPK

SEQ ID NO: 83 - DNA, 825 bp, synthetic construct
  source 1..825: mol_type = other DNA
atggactggatctggcggattctgttcctcgtgggagccgccacaggcgctcactcacaggtgcagctgctggaatctggcggcggactggtgcagcctggcggcagcctgagactgagctgcgccgccagcggcttcaccttcagcagctacaccatgagctgggtccggcaggctcctggacaggccctggaatggatgggcaccatcagcagcggcggcacctacacctactaccccgacagcgtgaagggccggttcaccatcagccgggacaacgccaagaacagcctgtacctgcagatgaacagcctgagagccgaggacacagccgtgtactactgcgccagagaggccatcttcacctactggggcagaggcaccctggtcacaagcagcggaggcggaggaagtggagggggaggatcaggcggcggaggcagcgatatccagctgacccagagccctagcagcctgagcgccagcgtgggcgacagagtgaccatcacatgcaaggccagccaggacatcaacaactacctgagctggtatcagcagaagcccggccaggcccccagactgctgatctaccgggccaacagactggtggacggcgtgcccgatagattcagcggcagcggctacggcaccgacttcaccctgaccatcaacaacatcgagtccgaggacgccgcctactacttctgcctgaagtacgacgtgttcccctacaccttcggccagggcaccaaggtggagatcaaggatctcgagcccaaatcttgtgacaaaactcacacatgcccaccgtgcccggatcccaag

SEQ ID NO: 84 - protein, 153 aa, synthetic construct
RSKRSRLLHSDYMNMTPRRPGPTRKHYQPYAPPRDFAAYRSRVKFSRSADAPAYQQGQNQLYNELNLGRREEYDVLDKRRGRDPEMGGKPRRKNPQEGLYNELQKDKMAEAYSEIGMKGERRRGKGHDGLYQGLSTATKDTYDALHMQALPPR

SEQ ID NO: 85 - DNA, 459 bp, synthetic construct
  source 1..459: mol_type = other DNA
cgcagcaagcggagccggctgctgcacagcgactacatgaacatgacccccagacggcctggccccaccagaaagcactaccagccttacgcccctcccagagacttcgccgcctaccggtccagagtgaagttcagcagaagcgccgacgcccctgcctatcagcagggccagaaccagctgtacaacgagctgaacctgggcagacgggaagagtacgacgtgctggacaagcggagaggcagggaccctgagatgggcggcaagcccagaagaaagaacccccaggaaggcctgtataacgaactgcagaaagacaagatggccgaggcctacagcgagatcggcatgaagggcgagcggagaagaggcaagggccacgatggcctgtaccagggactgagcaccgccaccaaggacacctacgacgccctgcacatgcaggccctgcctccaaga

SEQ ID NO: 86 - protein, 195 aa, synthetic construct
RSKRSRLLHSDYMNMTPRRPGPTRKHYQPYAPPRDFAAYRSRVKFSRSADAPAYQQGQNQLYNELNLGRREEYDVLDKRRGRDPEMGGKPRRKNPQEGLYNELQKDKMAEAYSEIGMKGERRRGKGHDGLYQGLSTATKDTYDALHMQALPPRAHPMRCMNYITKLYSEAKTKRKENVQHSKLEEKHIQVPESIV

SEQ ID NO: 87 - DNA, 588 bp, synthetic construct
  source 1..588: mol_type = other DNA
cgcagcaagcggagccggctgctgcacagcgactacatgaacatgacccccagacggcctggccccaccagaaagcactaccagccttacgcccctcccagagacttcgccgcctaccggtccagagtgaagttcagcagaagcgccgacgcccctgcctatcagcagggccagaaccagctgtacaacgagctgaacctgggcagacgggaagagtacgacgtgctggacaagcggagaggcagggaccctgagatgggcggcaagcccagaagaaagaacccccaggaaggcctgtataacgaactgcagaaagacaagatggccgaggcctacagcgagatcggcatgaagggcgagcggagaagaggcaagggccacgatggcctgtaccagggactgagcaccgccaccaaggacacctacgacgccctgcacatgcaggccctgcctccaagagcccaccccatgcggtgcatgaactacatcaccaagctgtactccgaggccaagaccaagcggaaagagaacgtccagcacagcaagctggaagagaagcacattcaggtgcccgagagcatcgtgtga

SEQ ID NO: 88 - protein, 311 aa, synthetic construct
MDWIWRILFLVGAATGAHSQVQLLESGGGLVQPGGSLRLSCAASGFTFSSYTMSWVRQAPGQALEWMGTISSGGTYTYYPDSVKGRFTISRDNAKNSLYLQMNSLRAEDTAVYYCAREAIFTYWGRGTLVTSSGGGGSGGGGSGGGGSDIQLTQSPSSLSASVGDRVTITCKASQDINNYLSWYQQKPGQAPRLLIYRANRLVDGVPDRFSGSGYGTDFTLTINNIESEDAAYYFCLKYDVFPYTFGQGTKVEIKDLEPKSCDKTHTCPPCPDPKFWVLVVVGGVLACYSLLVTVAFIIFWVRSKRSRLLH

SEQ ID NO: 89 - DNA, 933 bp, synthetic construct
  source 1..933: mol_type = other DNA
atggactggatctggcggattctgttcctcgtgggagccgccacaggcgctcactcacaggtgcagctgctggaatctggcggcggactggtgcagcctggcggcagcctgagactgagctgcgccgccagcggcttcaccttcagcagctacaccatgagctgggtccggcaggctcctggacaggccctggaatggatgggcaccatcagcagcggcggcacctacacctactaccccgacagcgtgaagggccggttcaccatcagccgggacaacgccaagaacagcctgtacctgcagatgaacagcctgagagccgaggacacagccgtgtactactgcgccagagaggccatcttcacctactggggcagaggcaccctggtcacaagcagcggaggcggaggaagtggagggggaggatcaggcggcggaggcagcgatatccagctgacccagagccctagcagcctgagcgccagcgtgggcgacagagtgaccatcacatgcaaggccagccaggacatcaacaactacctgagctggtatcagcagaagcccggccaggcccccagactgctgatctaccgggccaacagactggtggacggcgtgcccgatagattcagcggcagcggctacggcaccgacttcaccctgaccatcaacaacatcgagtccgaggacgccgcctactacttctgcctgaagtacgacgtgttcccctacaccttcggccagggcaccaaggtggagatcaaggatctcgagcccaaatcttgtgacaaaactcacacatgcccaccgtgcccggatcccaagttctgggtgctggtggtcgtgggcggagtgctggcctgttacagcctgctcgtgaccgtggccttcatcatcttttgggtgcgcagcaagcggagccggctgctgcac

SEQ ID NO: 90 - protein, 455 aa, synthetic construct
MDWIWRILFLVGAATGAHSQVQLLESGGGLVQPGGSLRLSCAASGFTFSSYTMSWVRQAPGQALEWMGTISSGGTYTYYPDSVKGRFTISRDNAKNSLYLQMNSLRAEDTAVYYCAREAIFTYWGRGTLVTSSGGGGSGGGGSGGGGSDIQLTQSPSSLSASVGDRVTITCKASQDINNYLSWYQQKPGQAPRLLIYRANRLVDGVPDRFSGSGYGTDFTLTINNIESEDAAYYFCLKYDVFPYTFGQGTKVEIKDLEPKSCDKTHTCPPCPDPKFWVLVVVGGVLACYSLLVTVAFIIFWVRSKRSRLLHSDYMNMTPRRPGPTRKHYQPYAPPRDFAAYRSRVKFSRSADAPAYQQGQNQLYNELNLGRREEYDVLDKRRGRDPEMGGKPRRKNPQEGLYNELQKDKMAEAYSEIGMKGERRRGKGHDGLYQGLSTATKDTYDALHMQALPPR

SEQ ID NO: 91 - DNA, 1365 bp, synthetic construct
  source 1..1365: mol_type = other DNA
atggactggatctggcggattctgttcctcgtgggagccgccacaggcgctcactcacaggtgcagctgctggaatctggcggcggactggtgcagcctggcggcagcctgagactgagctgcgccgccagcggcttcaccttcagcagctacaccatgagctgggtccggcaggctcctggacaggccctggaatggatgggcaccatcagcagcggcggcacctacacctactaccccgacagcgtgaagggccggttcaccatcagccgggacaacgccaagaacagcctgtacctgcagatgaacagcctgagagccgaggacacagccgtgtactactgcgccagagaggccatcttcacctactggggcagaggcaccctggtcacaagcagcggaggcggaggaagtggagggggaggatcaggcggcggaggcagcgatatccagctgacccagagccctagcagcctgagcgccagcgtgggcgacagagtgaccatcacatgcaaggccagccaggacatcaacaactacctgagctggtatcagcagaagcccggccaggcccccagactgctgatctaccgggccaacagactggtggacggcgtgcccgatagattcagcggcagcggctacggcaccgacttcaccctgaccatcaacaacatcgagtccgaggacgccgcctactacttctgcctgaagtacgacgtgttcccctacaccttcggccagggcaccaaggtggagatcaaggatctcgagcccaaatcttgtgacaaaactcacacatgcccaccgtgcccggatcccaagttctgggtgctggtggtcgtgggcggagtgctggcctgttacagcctgctcgtgaccgtggccttcatcatcttttgggtgcgcagcaagcggagccggctgctgcacagcgactacatgaacatgacccccagacggcctggccccaccagaaagcactaccagccttacgcccctcccagagacttcgccgcctaccggtccagagtgaagttcagcagaagcgccgacgcccctgcctatcagcagggccagaaccagctgtacaacgagctgaacctgggcagacgggaagagtacgacgtgctggacaagcggagaggcagggaccctgagatgggcggcaagcccagaagaaagaacccccaggaaggcctgtataacgaactgcagaaagacaagatggccgaggcctacagcgagatcggcatgaagggcgagcggagaagaggcaagggccacgatggcctgtaccagggactgagcaccgccaccaaggacacctacgacgccctgcacatgcaggccctgcctccaaga

SEQ ID NO: 92 - protein, 497 aa, synthetic construct
MDWIWRILFLVGAATGAHSQVQLLESGGGLVQPGGSLRLSCAASGFTFSSYTMSWVRQAPGQALEWMGTISSGGTYTYYPDSVKGRFTISRDNAKNSLYLQMNSLRAEDTAVYYCAREAIFTYWGRGTLVTSSGGGGSGGGGSGGGGSDIQLTQSPSSLSASVGDRVTITCKASQDINNYLSWYQQKPGQAPRLLIYRANRLVDGVPDRFSGSGYGTDFTLTINNIESEDAAYYFCLKYDVFPYTFGQGTKVEIKDLEPKSCDKTHTCPPCPDPKFWVLVVVGGVLACYSLLVTVAFIIFWVRSKRSRLLHSDYMNMTPRRPGPTRKHYQPYAPPRDFAAYRSRVKFSRSADAPAYQQGQNQLYNELNLGRREEYDVLDKRRGRDPEMGGKPRRKNPQEGLYNELQKDKMAEAYSEIGMKGERRRGKGHDGLYQGLSTATKDTYDALHMQALPPRAHPMRCMNYITKLYSEAKTKRKENVQHSKLEEKHIQVPESIV

SEQ ID NO: 93 - DNA, 1494 bp, synthetic construct
  source 1..1494: mol_type = other DNA
atggactggatctggcggattctgttcctcgtgggagccgccacaggcgctcactcacaggtgcagctgctggaatctggcggcggactggtgcagcctggcggcagcctgagactgagctgcgccgccagcggcttcaccttcagcagctacaccatgagctgggtccggcaggctcctggacaggccctggaatggatgggcaccatcagcagcggcggcacctacacctactaccccgacagcgtgaagggccggttcaccatcagccgggacaacgccaagaacagcctgtacctgcagatgaacagcctgagagccgaggacacagccgtgtactactgcgccagagaggccatcttcacctactggggcagaggcaccctggtcacaagcagcggaggcggaggaagtggagggggaggatcaggcggcggaggcagcgatatccagctgacccagagccctagcagcctgagcgccagcgtgggcgacagagtgaccatcacatgcaaggccagccaggacatcaacaactacctgagctggtatcagcagaagcccggccaggcccccagactgctgatctaccgggccaacagactggtggacggcgtgcccgatagattcagcggcagcggctacggcaccgacttcaccctgaccatcaacaacatcgagtccgaggacgccgcctactacttctgcctgaagtacgacgtgttcccctacaccttcggccagggcaccaaggtggagatcaaggatctcgagcccaaatcttgtgacaaaactcacacatgcccaccgtgcccggatcccaagttctgggtgctggtggtcgtgggcggagtgctggcctgttacagcctgctcgtgaccgtggccttcatcatcttttgggtgcgcagcaagcggagccggctgctgcacagcgactacatgaacatgacccccagacggcctggccccaccagaaagcactaccagccttacgcccctcccagagacttcgccgcctaccggtccagagtgaagttcagcagaagcgccgacgcccctgcctatcagcagggccagaaccagctgtacaacgagctgaacctgggcagacgggaagagtacgacgtgctggacaagcggagaggcagggaccctgagatgggcggcaagcccagaagaaagaacccccaggaaggcctgtataacgaactgcagaaagacaagatggccgaggcctacagcgagatcggcatgaagggcgagcggagaagaggcaagggccacgatggcctgtaccagggactgagcaccgccaccaaggacacctacgacgccctgcacatgcaggccctgcctccaagagcccaccccatgcggtgcatgaactacatcaccaagctgtactccgaggccaagaccaagcggaaagagaacgtccagcacagcaagctggaagagaagcacattcaggtgcccgagagcatcgtgtga

SEQ ID NO: 94 - protein, 114 aa, synthetic construct
QVQLLESGGGLVQPGGSLRLSCAASGFTFSSYTMSWVRQAPGQALEWMGTISSGGTYTYYPDSVKGRFTISRDNAKNSLYLQMNSLRAEDTAVYYCAREAIFTYWGRGTLVTSS

SEQ ID NO: 95 - DNA, 341 bp, synthetic construct
  source 1..341: mol_type = other DNA
aggtgcagctgctggaatctggcggcggactggtgcagcctggcggcagcctgagactgagctgcgccgccagcggcttcaccttcagcagctacaccatgagctgggtccggcaggctcctggacaggccctggaatggatgggcaccatcagcagcggcggcacctacacctactaccccgacagcgtgaagggccggttcaccatcagccgggacaacgccaagaacagcctgtacctgcagatgaacagcctgagagccgaggacacagccgtgtactactgcgccagagaggccatcttcacctactggggcagaggcaccctggtcacaagcagc

SEQ ID NO: 96 - protein, 107 aa, synthetic construct
DIQLTQSPSSLSASVGDRVTITCKASQDINNYLSWYQQKPGQAPRLLIYRANRLVDGVPDRFSGSGYGTDFTLTINNIESEDAAYYFCLKYDVFPYTFGQGTKVEIK

SEQ ID NO: 97 - DNA, 321 bp, synthetic construct
  source 1..321: mol_type = other DNA
gatatccagctgacccagagccctagcagcctgagcgccagcgtgggcgacagagtgaccatcacatgcaaggccagccaggacatcaacaactacctgagctggtatcagcagaagcccggccaggcccccagactgctgatctaccgggccaacagactggtggacggcgtgcccgatagattcagcggcagcggctacggcaccgacttcaccctgaccatcaacaacatcgagtccgaggacgccgcctactacttctgcctgaagtacgacgtgttcccctacaccttcggccagggcaccaaggtggagatcaag

SEQ ID NO: 98 - protein, 24 aa, synthetic construct
RQIKIWFQNRRMKWKKRSWFEAWA

SEQ ID NO: 99 - protein, 24 aa, synthetic construct
RQIKIWFQNRRMKWKKRSWFETWV

SEQ ID NO: 100 - DNA, 57 bp, synthetic construct
  source 1..57: mol_type = other DNA
atggactggatctggcggattctgttcctcgtgggagccgccacaggcgctcactca

SEQ ID NO: 101 - DNA, 45 bp, synthetic construct
  source 1..45: mol_type = other DNA
ggaggcggaggaagtggagggggaggatcaggcggcggaggcagc

SEQ ID NO: 102 - protein, 121 aa, synthetic construct
EVQLVESGGGLVQPGGSLRLSCAASGFTFSSFGMHWVRQAPGKGLEWVAYISSDSSAIYYADTVKGRFTISRDNAKNSLYLQMNSLRDEDTAVYYCGRGRENIYYGSRLDYWGQGTTVTVS

SEQ ID NO: 103 - DNA, 363 bp, synthetic construct
  source 1..363: mol_type = other DNA
gaagttcagctggttgagtctggcggcggactggttcaaccaggcggatctctgagactgagctgtgccgccagcggcttcacctttagcagctttggcatgcactgggtccgacaggcccctggcaaaggacttgagtgggtcgcctacatcagcagcgatagcagcgccatctactacgccgacaccgtgaagggcagattcaccatcagccgggacaacgccaagaacagcctgtacctgcagatgaactccctgcgcgacgaggataccgccgtgtactattgtggcagaggcagagagaacatctattacggcagcagactggactactggggccagggaacaaccgtgacagtctct

SEQ ID NO: 104 - protein, 16 aa, synthetic construct
SGGGGSGGGGSGGGGS

SEQ ID NO: 105 - DNA, 48 bp, synthetic construct
  source 1..48: mol_type = other DNA
tctggtggcggaggaagcggaggcggaggttcaggcggcggaggatct

SEQ ID NO: 106 - protein, 107 aa, synthetic construct
DIQLTQSPSFLSASVGDRVTITCKASQNVDTNVAWYQQKPGKAPKALIYSASYRYSGVPSRFSGSGSGTDFTLTISSLQPEDFATYYCQQYNNYPFTFGQGTKLEIK

SEQ ID NO: 107 - DNA, 321 bp, synthetic construct
  source 1..321: mol_type = other DNA
gatattcagctgactcagagccccagcttcctgagcgcctctgtgggagacagagtgaccatcacatgcaaggccagccagaacgtggacaccaacgtggcctggtatcagcagaagcctggcaaggctcccaaggctctgatctacagcgccagctacagatacagcggcgtgcccagcagattttctggcagcggctctggcaccgacttcaccctgaccatatctagcctgcagcctgaggacttcgccacctactactgccagcagtacaacaactaccccttcaccttcggccagggcaccaagctggaaatcaag

SEQ ID NO: 108 - DNA, 135 bp, synthetic construct
  source 1..135: mol_type = other DNA
accaccacaccagctcctcggcctccaactcctgctcctacaattgccagccagcctctgtctctgaggcccgaagcttgtagacctgctgctggcggagccgtgcatacaagaggactggatttcgcctgcgac

SEQ ID NO: 109 - DNA, 123 bp, synthetic construct
  source 1..123: mol_type = other DNA
cggtccaagagaagcagactgctgcacagcgactacatgaacatgacccctagacggcccggacctaccagaaagcactaccagccttacgctcctcctagagatttcgccgcctaccggtcc

SEQ ID NO: 110 - DNA, 336 bp, synthetic construct
  source 1..336: mol_type = other DNA
agagtgaagttctccagatccgccgatgctcccgcctatcagcagggacagaaccagctgtacaacgagctgaacctggggagaagagaagagtacgacgtgctggacaagcggagaggcagggatcctgagatgggcggcaagcccagacggaagaatcctcaagagggcctgtataatgagctgcagaaagacaagatggccgaggcctacagcgagatcggaatgaagggcgagcgcagaagaggcaagggacacgatggactgtaccagggcctgagcaccgccaccaaggatacctatgatgccctgcacatgcaggccctgcctccaaga

SEQ ID NO: 111 - protein, 28 aa, synthetic construct
IYIWAPLAGTCGVLLLSLVITLYCKRGR

SEQ ID NO: 112 - DNA, 87 bp, synthetic construct
  source 1..87: mol_type = other DNA
atctacatctgggcccctctggctggaacatgtggcgttctgctgctgagcctggtcatcaccctgtactgcaagcggggcagatga

SEQ ID NO: 113 - protein, 41 aa, synthetic construct
HPMRCMNYITKLYSEAKTKRKENVQHSKLEEKHIQVPESIA

SEQ ID NO: 114 - DNA, 126 bp, synthetic construct
  source 1..126: mol_type = other DNA
caccccatgcggtgcatgaactacatcaccaagctgtactccgaggccaagaccaagcggaaagagaacgtccagcacagcaagctggaagagaagcacattcaggtgcccgagagcatcgcgtga

SEQ ID NO: 115 - protein, 507 aa, synthetic construct
EVQLVESGGGLVQPGGSLRLSCAASGFTFSSFGMHWVRQAPGKGLEWVAYISSDSSAIYYADTVKGRFTISRDNAKNSLYLQMNSLRDEDTAVYYCGRGRENIYYGSRLDYWGQGTTVTVSSGGGGSGGGGSGGGGSDIQLTQSPSFLSASVGDRVTITCKASQNVDTNVAWYQQKPGKAPKALIYSASYRYSGVPSRFSGSGSGTDFTLTISSLQPEDFATYYCQQYNNYPFTFGQGTKLEIKTTTPAPRPPTPAPTIASQPLSLRPEACRPAAGGAVHTRGLDFACDIYIWAPLAGTCGVLLLSLVITLYCRSKRSRLLHSDYMNMTPRRPGPTRKHYQPYAPPRDFAAYRSRVKFSRSADAPAYQQGQNQLYNELNLGRREEYDVLDKRRGRDPEMGGKPRRKNPQEGLYNELQKDKMAEAYSEIGMKGERRRGKGHDGLYQGLSTATKDTYDALHMQALPPRHPMRCMNYITKLYSEAKTKRKENVQHSKLEEKHIQVPESIV

SEQ ID NO: 116 - DNA, 1527 bp, synthetic construct
  source 1..1527: mol_type = other DNA
gaagttcagctggttgagtctggcggcggactggttcaaccaggcggatctctgagactgagctgtgccgccagcggcttcacctttagcagctttggcatgcactgggtccgacaggcccctggcaaaggacttgagtgggtcgcctacatcagcagcgatagcagcgccatctactacgccgacaccgtgaagggcagattcaccatcagccgggacaacgccaagaacagcctgtacctgcagatgaactccctgcgcgacgaggataccgccgtgtactattgtggcagaggcagagagaacatctattacggcagcagactggactactggggccagggaacaaccgtgacagtctcttctggtggcggaggaagcggaggcggaggttcaggcggcggaggatctgatattcagctgactcagagccccagcttcctgagcgcctctgtgggagacagagtgaccatcacatgcaaggccagccagaacgtggacaccaacgtggcctggtatcagcagaagcctggcaaggctcccaaggctctgatctacagcgccagctacagatacagcggcgtgcccagcagattttctggcagcggctctggcaccgacttcaccctgaccatatctagcctgcagcctgaggacttcgccacctactactgccagcagtacaacaactaccccttcaccttcggccagggcaccaagctggaaatcaagaccaccacaccagctcctcggcctccaactcctgctcctacaattgccagccagcctctgtctctgaggcccgaagcttgtagacctgctgctggcggagccgtgcatacaagaggactggatttcgcctgcgacatctacatctgggcccctctggctggaacatgtggcgttctgctgctgagcctggtcatcaccctgtactgccggtccaagagaagcagactgctgcacagcgactacatgaacatgacccctagacggcccggacctaccagaaagcactaccagccttacgctcctcctagagatttcgccgcctaccggtccagagtgaagttctccagatccgccgatgctcccgcctatcagcagggacagaaccagctgtacaacgagctgaacctggggagaagagaagagtacgacgtgctggacaagcggagaggcagggatcctgagatgggcggcaagcccagacggaagaatcctcaagagggcctgtataatgagctgcagaaagacaagatggccgaggcctacagcgagatcggaatgaagggcgagcgcagaagaggcaagggacacgatggactgtaccagggcctgagcaccgccaccaaggatacctatgatgccctgcacatgcaggccctgcctccaagagcccaccccatgcggtgcatgaactacatcaccaagctgtactccgaggccaagaccaagcggaaagagaacgtccagcacagcaagctggaagagaagcacattcaggtgcccgagagcatcgtgtga

SEQ ID NO: 117 - protein, 466 aa, synthetic construct
EVQLVESGGGLVQPGGSLRLSCAASGFTFSSFGMHWVRQAPGKGLEWVAYISSDSSAIYYADTVKGRFTISRDNAKNSLYLQMNSLRDEDTAVYYCGRGRENIYYGSRLDYWGQGTTVTVSSGGGGSGGGGSGGGGSDIQLTQSPSFLSASVGDRVTITCKASQNVDTNVAWYQQKPGKAPKALIYSASYRYSGVPSRFSGSGSGTDFTLTISSLQPEDFATYYCQQYNNYPFTFGQGTKLEIKTTTPAPRPPTPAPTIASQPLSLRPEACRPAAGGAVHTRGLDFACDIYIWAPLAGTCGVLLLSLVITLYCRSKRSRLLHSDYMNMTPRRPGPTRKHYQPYAPPRDFAAYRSRVKFSRSADAPAYQQGQNQLYNELNLGRREEYDVLDKRRGRDPEMGGKPRRKNPQEGLYNELQKDKMAEAYSEIGMKGERRRGKGHDGLYQGLSTATKDTYDALHMQALPPR

SEQ ID NO: 118 - DNA, 1398 bp, synthetic construct
  source 1..1398: mol_type = other DNA
gaagttcagctggttgagtctggcggcggactggttcaaccaggcggatctctgagactgagctgtgccgccagcggcttcacctttagcagctttggcatgcactgggtccgacaggcccctggcaaaggacttgagtgggtcgcctacatcagcagcgatagcagcgccatctactacgccgacaccgtgaagggcagattcaccatcagccgggacaacgccaagaacagcctgtacctgcagatgaactccctgcgcgacgaggataccgccgtgtactattgtggcagaggcagagagaacatctattacggcagcagactggactactggggccagggaacaaccgtgacagtctcttctggtggcggaggaagcggaggcggaggttcaggcggcggaggatctgatattcagctgactcagagccccagcttcctgagcgcctctgtgggagacagagtgaccatcacatgcaaggccagccagaacgtggacaccaacgtggcctggtatcagcagaagcctggcaaggctcccaaggctctgatctacagcgccagctacagatacagcggcgtgcccagcagattttctggcagcggctctggcaccgacttcaccctgaccatatctagcctgcagcctgaggacttcgccacctactactgccagcagtacaacaactaccccttcaccttcggccagggcaccaagctggaaatcaagaccaccacaccagctcctcggcctccaactcctgctcctacaattgccagccagcctctgtctctgaggcccgaagcttgtagacctgctgctggcggagccgtgcatacaagaggactggatttcgcctgcgacatctacatctgggcccctctggctggaacatgtggcgttctgctgctgagcctggtcatcaccctgtactgccggtccaagagaagcagactgctgcacagcgactacatgaacatgacccctagacggcccggacctaccagaaagcactaccagccttacgctcctcctagagatttcgccgcctaccggtccagagtgaagttctccagatccgccgatgctcccgcctatcagcagggacagaaccagctgtacaacgagctgaacctggggagaagagaagagtacgacgtgctggacaagcggagaggcagggatcctgagatgggcggcaagcccagacggaagaatcctcaagagggcctgtataatgagctgcagaaagacaagatggccgaggcctacagcgagatcggaatgaagggcgagcgcagaagaggcaagggacacgatggactgtaccagggcctgagcaccgccaccaaggatacctatgatgccctgcacatgcaggccctgcctccaaga

SEQ ID NO: 119 - protein, 317 aa, synthetic construct
EVQLVESGGGLVQPGGSLRLSCAASGFTFSSFGMHWVRQAPGKGLEWVAYISSDSSAIYYADTVKGRFTISRDNAKNSLYLQMNSLRDEDTAVYYCGRGRENIYYGSRLDYWGQGTTVTVSSGGGGSGGGGSGGGGSDIQLTQSPSFLSASVGDRVTITCKASQNVDTNVAWYQQKPGKAPKALIYSASYRYSGVPSRFSGSGSGTDFTLTISSLQPEDFATYYCQQYNNYPFTFGQGTKLEIKTTTPAPRPPTPAPTIASQPLSLRPEACRPAAGGAVHTRGLDFACDIYIWAPLAGTCGVLLLSLVITLYCKRGR

SEQ ID NO: 120 - DNA, 954 bp, synthetic construct
  source 1..954: mol_type = other DNA
gaagttcagctggttgagtctggcggcggactggttcaaccaggcggatctctgagactgagctgtgccgccagcggcttcacctttagcagctttggcatgcactgggtccgacaggcccctggcaaaggacttgagtgggtcgcctacatcagcagcgatagcagcgccatctactacgccgacaccgtgaagggcagattcaccatcagccgggacaacgccaagaacagcctgtacctgcagatgaactccctgcgcgacgaggataccgccgtgtactattgtggcagaggcagagagaacatctattacggcagcagactggactactggggccagggaacaaccgtgacagtctcttctggtggcggaggaagcggaggcggaggttcaggcggcggaggatctgatattcagctgactcagagccccagcttcctgagcgcctctgtgggagacagagtgaccatcacatgcaaggccagccagaacgtggacaccaacgtggcctggtatcagcagaagcctggcaaggctcccaaggctctgatctacagcgccagctacagatacagcggcgtgcccagcagattttctggcagcggctctggcaccgacttcaccctgaccatatctagcctgcagcctgaggacttcgccacctactactgccagcagtacaacaactaccccttcaccttcggccagggcaccaagctggaaatcaagaccaccacaccagctcctcggcctccaactcctgctcctacaattgccagccagcctctgtctctgaggcccgaagcttgtagacctgctgctggcggagccgtgcatacaagaggactggatttcgcctgcgacatctacatctgggcccctctggctggaacatgtggcgttctgctgctgagcctggtcatcaccctgtactgcaagcggggcagatga

SEQ ID NO: 121 - protein, 244 aa, synthetic construct
EVQLVESGGGLVQPGGSLRLSCAASGFTFSSFGMHWVRQAPGKGLEWVAYISSDSSAIYYADTVKGRFTISRDNAKNSLYLQMNSLRDEDTAVYYCGRGRENIYYGSRLDYWGQGTTVTVSSGGGGSGGGGSGGGGSDIQLTQSPSFLSASVGDRVTITCKASQNVDTNVAWYQQKPGKAPKALIYSASYRYSGVPSRFSGSGSGTDFTLTISSLQPEDFATYYCQQYNNYPFTFGQGTKLEIK

SEQ ID NO: 122 - DNA, 732 bp, synthetic construct
  source 1..732: mol_type = other DNA
gaagttcagctggttgagtctggcggcggactggttcaaccaggcggatctctgagactgagctgtgccgccagcggcttcacctttagcagctttggcatgcactgggtccgacaggcccctggcaaaggacttgagtgggtcgcctacatcagcagcgatagcagcgccatctactacgccgacaccgtgaagggcagattcaccatcagccgggacaacgccaagaacagcctgtacctgcagatgaactccctgcgcgacgaggataccgccgtgtactattgtggcagaggcagagagaacatctattacggcagcagactggactactggggccagggaacaaccgtgacagtctcttctggtggcggaggaagcggaggcggaggttcaggcggcggaggatctgatattcagctgactcagagccccagcttcctgagcgcctctgtgggagacagagtgaccatcacatgcaaggccagccagaacgtggacaccaacgtggcctggtatcagcagaagcctggcaaggctcccaaggctctgatctacagcgccagctacagatacagcggcgtgcccagcagattttctggcagcggctctggcaccgacttcaccctgaccatatctagcctgcagcctgaggacttcgccacctactactgccagcagtacaacaactaccccttcaccttcggccagggcaccaagctggaaatcaag

SEQ ID NO: 123 - protein, 289 aa, synthetic construct
EVQLVESGGGLVQPGGSLRLSCAASGFTFSSFGMHWVRQAPGKGLEWVAYISSDSSAIYYADTVKGRFTISRDNAKNSLYLQMNSLRDEDTAVYYCGRGRENIYYGSRLDYWGQGTTVTVSSGGGGSGGGGSGGGGSDIQLTQSPSFLSASVGDRVTITCKASQNVDTNVAWYQQKPGKAPKALIYSASYRYSGVPSRFSGSGSGTDFTLTISSLQPEDFATYYCQQYNNYPFTFGQGTKLEIKTTTPAPRPPTPAPTIASQPLSLRPEACRPAAGGAVHTRGLDFACD

SEQ ID NO: 124 - DNA, 867 bp, synthetic construct
  source 1..867: mol_type = other DNA
gaagttcagctggttgagtctggcggcggactggttcaaccaggcggatctctgagactgagctgtgccgccagcggcttcacctttagcagctttggcatgcactgggtccgacaggcccctggcaaaggacttgagtgggtcgcctacatcagcagcgatagcagcgccatctactacgccgacaccgtgaagggcagattcaccatcagccgggacaacgccaagaacagcctgtacctgcagatgaactccctgcgcgacgaggataccgccgtgtactattgtggcagaggcagagagaacatctattacggcagcagactggactactggggccagggaacaaccgtgacagtctcttctggtggcggaggaagcggaggcggaggttcaggcggcggaggatctgatattcagctgactcagagccccagcttcctgagcgcctctgtgggagacagagtgaccatcacatgcaaggccagccagaacgtggacaccaacgtggcctggtatcagcagaagcctggcaaggctcccaaggctctgatctacagcgccagctacagatacagcggcgtgcccagcagattttctggcagcggctctggcaccgacttcaccctgaccatatctagcctgcagcctgaggacttcgccacctactactgccagcagtacaacaactaccccttcaccttcggccagggcaccaagctggaaatcaagaccaccacaccagctcctcggcctccaactcctgctcctacaattgccagccagcctctgtctctgaggcccgaagcttgtagacctgctgctggcggagccgtgcatacaagaggactggatttcgcctgcgac

SEQ ID NO: 125 - protein, 194 aa, synthetic construct
RSKRSRLLHSDYMNMTPRRPGPTRKHYQPYAPPRDFAAYRSRVKFSRSADAPAYQQGQNQLYNELNLGRREEYDVLDKRRGRDPEMGGKPRRKNPQEGLYNELQKDKMAEAYSEIGMKGERRRGKGHDGLYQGLSTATKDTYDALHMQALPPRHPMRCMNYITKLYSEAKTKRKENVQHSKLEEKHIQVPESIV

SEQ ID NO: 126 - DNA, 588 bp, synthetic construct
  source 1..588: mol_type = other DNA
cggtccaagagaagcagactgctgcacagcgactacatgaacatgacccctagacggcccggacctaccagaaagcactaccagccttacgctcctcctagagatttcgccgcctaccggtccagagtgaagttctccagatccgccgatgctcccgcctatcagcagggacagaaccagctgtacaacgagctgaacctggggagaagagaagagtacgacgtgctggacaagcggagaggcagggatcctgagatgggcggcaagcccagacggaagaatcctcaagagggcctgtataatgagctgcagaaagacaagatggccgaggcctacagcgagatcggaatgaagggcgagcgcagaagaggcaagggacacgatggactgtaccagggcctgagcaccgccaccaaggatacctatgatgccctgcacatgcaggccctgcctccaagagcccaccccatgcggtgcatgaactacatcaccaagctgtactccgaggccaagaccaagcggaaagagaacgtccagcacagcaagctggaagagaagcacattcaggtgcccgagagcatcgtgtga

SEQ ID NO: 127 - protein, 289 aa, synthetic construct; identical to SEQ ID NO: 123

SEQ ID NO: 128 - DNA, 867 bp, synthetic construct; identical to SEQ ID NO: 124
  source 1..867: mol_type = other DNA

SEQ ID NO: 129 - DNA, 459 bp, synthetic construct
  source 1..459: mol_type = other DNA
cggtccaagagaagcagactgctgcacagcgactacatgaacatgacccctagacggcccggacctaccagaaagcactaccagccttacgctcctcctagagatttcgccgcctaccggtccagagtgaagttctccagatccgccgatgctcccgcctatcagcagggacagaaccagctgtacaacgagctgaacctggggagaagagaagagtacgacgtgctggacaagcggagaggcagggatcctgagatgggcggcaagcccagacggaagaatcctcaagagggcctgtataatgagctgcagaaagacaagatggccgaggcctacagcgagatcggaatgaagggcgagcgcagaagaggcaagggacacgatggactgtaccagggcctgagcaccgccaccaaggatacctatgatgccctgcacatgcaggccctgcctccaaga

SEQ ID NO: 130 - skipped

SEQ ID NO: 131 - protein, 5 aa, Homo sapiens
ELSKR

SEQ ID NO: 132 - protein, 5 aa, Homo sapiens
HLLPM

SEQ ID NO: 133 - protein, 5 aa, Homo sapiens
EAMMD

SEQ ID NO: 134 - protein, 5 aa, Homo sapiens
VETEA

SEQ ID NO: 135 - protein, 5 aa, Homo sapiens
LSATV

SEQ ID NO: 136 - protein, 5 aa, Homo sapiens
ELAWQ

SEQ ID NO: 137 - protein, 5 aa, Homo sapiens
LTNVI

SEQ ID NO: 138 - protein, 5 aa, Homo sapiens
TFDWH

SEQ ID NO: 139 - protein, 5 aa, Homo sapiens
HPPDT

SEQ ID NO: 140 - protein, 5 aa, Homo sapiens
QDTRL

SEQ ID NO: 141 - protein, 5 aa, Homo sapiens
KRRSK

SEQ ID NO: 142 - protein, 5 aa, Homo sapiens
TVTVK

SEQ ID NO: 143 - protein, 5 aa, Homo sapiens
SGLHW

SEQ ID NO: 144 - protein, 5 aa, Homo sapiens
EVSGI

SEQ ID NO: 145 - protein, 5 aa, Homo sapiens
LKLNA

SEQ ID NO: 146 - protein, 5 aa, Homo sapiens
HRKLL

SEQ ID NO: 147 - protein, 5 aa, Homo sapiens
PAAAK

SEQ ID NO: 148 - protein, 5 aa, Homo sapiens
ESIHT

SEQ ID NO: 149 - protein, 5 aa, Homo sapiens
KEVAM

SEQ ID NO: 150 - protein, 5 aa, Homo sapiens
TPKQL

SEQ ID NO: 151 - protein, 5 aa, Homo sapiens
QEFWS

SEQ ID NO: 152 - protein, 5 aa, Homo sapiens
NQIHR

SEQ ID NO: 153 - protein, 5 aa, Homo sapiens
RCCIL

SEQ ID NO: 154 - protein, 5 aa, Homo sapiens
APIIR

SEQ ID NO: 155 - protein, 5 aa, Homo sapiens
RTTPV

SEQ ID NO: 156 - protein, 5 aa, Homo sapiens
IRGSS

SEQ ID NO: 157 - protein, 5 aa, Homo sapiens
FVDVM

SEQ ID NO: 158 - protein, 5 aa, Homo sapiens
KRYGG

SEQ ID NO: 159 - protein, 5 aa, Homo sapiens
VGEFF

SEQ ID NO: 160 - protein, 5 aa, Homo sapiens
EMYDI

SEQ ID NO: 161 - protein, 5 aa, Homo sapiens
LGLCD

SEQ ID NO: 162 - protein, 5 aa, Homo sapiens
FGRRK

SEQ ID NO: 163 - protein, 5 aa, Homo sapiens
LLGPV

SEQ ID NO: 164 - protein, 5 aa, Homo sapiens
ANPLL

SEQ ID NO: 165 - protein, 5 aa, Homo sapiens
VLVPV

SEQ ID NO: 166 - protein, 5 aa, Homo sapiens
WSLLK

SEQ ID NO: 167 - protein, 5 aa, Homo sapiens
VIPKS

SEQ ID NO: 168 - protein, 5 aa, Homo sapiens
RFSSV

SEQ ID NO: 169 - protein, 5 aa, Homo sapiens
KLLHP

SEQ ID NO: 170 - protein, 5 aa, Homo sapiens
GMALI

SEQ ID NO: 171 - protein, 5 aa, Homo sapiens
RVPMP

SEQ ID NO: 172 - protein, 5 aa, Homo sapiens
KESLV

SEQ ID NO: 173 - protein, 5 aa, Homo sapiens
VWECR

SEQ ID NO: 174 - protein, 5 aa, Homo sapiens
LEPDS

SEQ ID NO: 175 - protein, 5 aa, Homo sapiens
KRQRD

SEQ ID NO: 176 - protein, 5 aa, Homo sapiens
GAVLW

SEQ ID NO: 177 - protein, 5 aa, Homo sapiens
TRSYC

SEQ ID NO: 178 - protein, 5 aa, Homo sapiens
KDVYE

SEQ ID NO: 179 - protein, 5 aa, Homo sapiens
SCTLL

SEQ ID NO: 180 - protein, 5 aa, Homo sapiens
RPQMM

SEQ ID NO: 181 - protein, 5 aa, Homo sapiens
TTILE

SEQ ID NO: 182 - protein, 5 aa, Homo sapiens
TYRVS

SEQ ID NO: 183 - protein, 5 aa, Homo sapiens
RDQYY

SEQ ID NO: 184 - protein, 5 aa, Homo sapiens
NTFGY

SEQ ID NO: 185 - protein, 5 aa, Homo sapiens
EQSLI

SEQ ID NO: 186 - protein, 5 aa, Homo sapiens
PQSSK

SEQ ID NO: 187 - protein, 5 aa, Homo sapiens
TRKQK

SEQ ID NO: 188 - protein, 5 aa, Homo sapiens
TEKTD

SEQ ID NO: 189 - protein, 5 aa, Homo sapiens
RQSTN

SEQ ID NO: 190 - protein, 5 aa, Homo sapiens
HYRSP

SEQ ID NO: 191 - protein, 5 aa, Homo sapiens
PLLEL

SEQ ID NO: 192 - protein, 5 aa, Homo sapiens
VCLIM

SEQ ID NO: 193 - protein, 5 aa, Homo sapiens
RQRRQ

SEQ ID NO: 194 - protein, 5 aa, Homo sapiens
NREMV

SEQ ID NO: 195 - protein, 5 aa, Homo sapiens
GPAPL

SEQ ID NO: 196 - protein, 5 aa, Homo sapiens
TIADA

SEQ ID NO: 197 - protein, 5 aa, Homo sapiens
EALMV

SEQ ID NO: 198 - protein, 5 aa, Homo sapiens
LPPIV

SEQ ID NO: 199 - protein, 5 aa, Homo sapiens
AITSP

SEQ ID NO: 200 - protein, 5 aa, Homo sapiens
SKLYL

SEQ ID NO: 201 - protein, 5 aa, Homo sapiens
LNHPY

SEQ ID NO: 202 - protein, 5 aa, Homo sapiens
PPTGI

SEQ ID NO: 203 - protein, 5 aa, Homo sapiens
EDYLH

SEQ ID NO: 204 - protein, 5 aa, Homo sapiens
TCSPI

SEQ ID NO: 205 - protein, 5 aa, Homo sapiens
SASEV

SEQ ID NO: 206 - protein, 5 aa, Homo sapiens
SKAME

SEQ ID NO: 207 - protein, 5 aa, Homo sapiens
LELDS

SEQ ID NO: 208 - protein, 5 aa, Homo sapiens
KKYDA

SEQ ID NO: 209 - protein, 5 aa, Homo sapiens
VEPLS

SEQ ID NO: 210 - protein, 5 aa, Homo sapiens
EYLGL

SEQ ID NO: 211 - protein, 5 aa, Homo sapiens
KSQLH

SEQ ID NO: 212 - protein, 5 aa, Homo sapiens
QLGMM

SEQ ID NO: 213 - protein, 5 aa, Homo sapiens
QYYCS

SEQ ID NO: 214 - protein, 5 aa, Homo sapiens
HENSY

SEQ ID NO: 215 - protein, 5 aa, Homo sapiens
KKPGP

SEQ ID NO: 216 - protein, 5 aa, Homo sapiens
SGFRL

SEQ ID NO: 217 - protein, 5 aa, Homo sapiens
CDTVD

SEQ ID NO: 218 - protein, 5 aa, Homo sapiens
KSSDS

SEQ ID NO: 219 - protein, 5 aa, Homo sapiens
KKEGS

SEQ ID NO: 220 - protein, 5 aa, Homo sapiens
WLLKT

SEQ ID NO: 221 - protein, 5 aa, Homo sapiens
LCPAA

SEQ ID NO: 222 - protein, 5 aa, Homo sapiens
PGETS

SEQ ID NO: 223 - protein, 5 aa, Homo sapiens
RRVPK

SEQ ID NO: 224 - protein, 5 aa, Homo sapiens
ANAPK

SEQ ID NO: 225 - protein, 5 aa, Homo sapiens
SRSSG

SEQ ID NO: 226 - protein, 5 aa, Homo sapiens
DGRLR

SEQ ID NO: 227 - protein, 5 aa, Homo sapiens
RTSII

SEQ ID NO: 228 - protein, 5 aa, Homo sapiens
KETSI

SEQ ID NO: 229 - protein, 5 aa, Homo sapiens
GRRKP

SEQ ID NO: 230 - protein, 5 aa, Homo sapiens
HQLHL

SEQ ID NO: 231 - protein, 5 aa, Homo sapiens
CCVAH

SEQ ID NO: 232 - protein, 5 aa, Homo sapiens
SETTV

SEQ ID NO: 233 - protein, 5 aa, Homo sapiens
LGMNN

SEQ ID NO: 234 - protein, 5 aa, Homo sapiens
EEDPE

SEQ ID NO: 235 - protein, 5 aa, Homo sapiens
LDLRY

SEQ ID NO: 236 - protein, 5 aa, Homo sapiens
PTPHQ

SEQ ID NO: 237 - protein, 5 aa, Homo sapiens
TSYCF

SEQ ID NO: 238 - protein, 5 aa, Homo sapiens
LGRRQ

SEQ ID NO: 239 - protein, 5 aa, Homo sapiens
WNKKV

SEQ ID NO: 240 - protein, 5 aa, Homo sapiens
LLENA

SEQ ID NO: 241 - protein, 5 aa, Homo sapiens
PDVKA

SEQ ID NO: 242 - protein, 5 aa, Homo sapiens
DLPMS

SEQ ID NO: 243 - protein, 5 aa, Homo sapiens
RKSLM

SEQ ID NO: 244 - protein, 5 aa, Homo sapiens
GEVAL

SEQ ID NO: 245 - protein, 5 aa, Homo sapiens
NTSAS

SEQ ID NO: 246 - protein, 5 aa, Homo sapiens
KPLRS

SEQ ID NO: 247 - protein, 5 aa, Homo sapiens
KKTKH

SEQ ID NO: 248 - protein, 5 aa, Homo sapiens
WCTFS

SEQ ID NO: 249 - protein, 5 aa, Homo sapiens
KEEKE

SEQ ID NO: 250 - protein, 5 aa, Homo sapiens
VGHQH

SEQ ID NO: 251 - protein, 5 aa, Homo sapiens
SSKSI

SEQ ID NO: 252 - protein, 5 aa, Homo sapiens
QANST

SEQ ID NO: 253 - protein, 5 aa, Homo sapiens
RELTV

SEQ ID NO: 254 - protein, 5 aa, Homo sapiens
NTFGF

SEQ ID NO: 255 - protein, 5 aa, Homo sapiens
KLSKM

SEQ ID NO: 256 - protein, 5 aa, Homo sapiens
LSIGK

SEQ ID NO: 257 - protein, 5 aa, Homo sapiens
WKLQY

SEQ ID NO: 258 - protein, 5 aa, Homo sapiens
QKPKF

SEQ ID NO: 259 - protein, 5 aa, Homo sapiens
GRRSP

SEQ ID NO: 260 - protein, 5 aa, Homo sapiens
EENKD

SEQ ID NO: 261 - protein, 5 aa, Homo sapiens
DGPQM

SEQ ID NO: 262 - protein, 5 aa, Homo sapiens
KKAKR

SEQ ID NO: 263 - protein, 5 aa, Homo sapiens
GDTKP

SEQ ID NO: 264 - protein, 5 aa, Homo sapiens
EENLA

SEQ ID NO: 265 - protein, 5 aa, Homo sapiens
VLGPC

SEQ ID NO: 266 - protein, 5 aa, Homo sapiens
KEKDK

SEQ ID NO: 267 - protein, 5 aa, Homo sapiens
LEVHL

SEQ ID NO: 268 - protein, 5 aa, Homo sapiens
EITIF

SEQ ID NO: 269 - protein, 5 aa, Homo sapiens
AKTCL

SEQ ID NO: 270 - protein, 5 aa, Homo sapiens
AAGYP

SEQ ID NO: 271 - protein, 5 aa, Homo sapiens
LGNYK

SEQ ID NO: 272 - protein, 5 aa, Homo sapiens
SISAR

SEQ ID NO: 273 - protein, 5 aa, Homo sapiens
EESKS

SEQ ID NO: 274 - protein, 5 aa, Homo sapiens
LRQLL

SEQ ID NO: 275 - protein, 5 aa, Homo sapiens
PEQQS

SEQ ID NO: 276 - protein, 5 aa, Homo sapiens
WVVSS

SEQ ID NO: 277 - protein, 5 aa, Homo sapiens
WKYCV

SEQ ID NO: 278 - protein, 5 aa, Homo sapiens
NHDEL

SEQ ID NO: 279 - protein, 5 aa, Homo sapiens
APVAS

SEQ ID NO: 280 - protein, 5 aa, Homo sapiens
LAWFS

SEQ ID NO: 281 - protein, 5 aa, Homo sapiens
FQKDI

SEQ ID NO: 282 - protein, 5 aa, Homo sapiens
VEQQA

SEQ ID NO: 283 - protein, 5 aa, Homo sapiens
KGKRK

SEQ ID NO: 284 - protein, 5 aa, Homo sapiens
KKVHP

SEQ ID NO: 285 - protein, 5 aa, Homo sapiens
TKENE

SEQ ID NO: 286 - protein, 5 aa, Homo sapiens
THTKK

SEQ ID NO: 287 - protein, 5 aa, Homo sapiens
QRAPN

SEQ ID NO: 288 - protein, 5 aa, Homo sapiens
LVFPL

SEQ ID NO: 289 - protein, 5 aa, Homo sapiens
KSAHV

SEQ ID NO: 290 - protein, 5 aa, Homo sapiens
VPPHW

SEQ ID NO: 291 - protein, 5 aa, Homo sapiens
SNLVI

SEQ ID NO: 292 - protein, 5 aa, Homo sapiens
FPWNP

SEQ ID NO: 293 - protein, 5 aa, Homo sapiens
ESDEF

SEQ ID NO: 294 - protein, 5 aa, Homo sapiens
HSLKD

SEQ ID NO: 295 - protein, 5 aa, Homo sapiens
EPMDP

SEQ ID NO: 296 - protein, 5 aa, Homo sapiens
AKNAP

SEQ ID NO: 297 - protein, 5 aa, Homo sapiens
SLKNV

SEQ ID NO: 298 - protein, 5 aa, Homo sapiens
AAKSS

SEQ ID NO: 299 - protein, 5 aa, Homo sapiens
PVCPP

SEQ ID NO: 300 - protein, 5 aa, Homo sapiens
TTTNV

SEQ ID NO: 301 - protein, 5 aa, Homo sapiens
NYSML

SEQ ID NO: 302 - protein, 5 aa, Homo sapiens
EYNLV

SEQ ID NO: 303 - protein, 5 aa, Homo sapiens
FLPWT

SEQ ID NO: 304 - protein, 5 aa, Homo sapiens
LLNVT

SEQ ID NO: 305 - protein, 5 aa, Homo sapiens
EGPSC

SEQ ID NO: 306 - protein, 5 aa, Homo sapiens
RGYKN

SEQ ID NO: 307 - protein, 5 aa, Homo sapiens
VPHGR

SEQ ID NO: 308 - protein, 5 aa, Homo sapiens
NSLLH

SEQ ID NO: 309 - protein, 5 aa, Homo sapiens
VILKH

SEQ ID NO: 310 - protein, 5 aa, Homo sapiens
PKGSC

SEQ ID NO: 311 - protein, 5 aa, Homo sapiens
PTHHE

SEQ ID NO: 312 - protein, 5 aa, Homo sapiens
EVGLP

SEQ ID NO: 313 - protein, 5 aa, Homo sapiens
PDEGS

SEQ ID NO: 314 - protein, 5 aa, Homo sapiens
PPSDT

SEQ ID NO: 315 - protein, 5 aa, Homo sapiens
DPFFN

SEQ ID NO: 316 - protein, 5 aa, Homo sapiens
PPDKS

SEQ ID NO: 317 - protein, 5 aa, Homo sapiens
DTDDD

SEQ ID NO: 318 - protein, 5 aa, Homo sapiens
PEETK

SEQ ID NO: 319 - protein, 5 aa, Homo sapiens
LKGPQ

SEQ ID NO: 320 - protein, 5 aa, Homo sapiens
TMRDK

SEQ ID NO: 321 - protein, 5 aa, Homo sapiens
AKAKN

SEQ ID NO: 322 - protein, 5 aa, Homo sapiens
EMEHV

SEQ ID NO: 323 - protein, 5 aa, Homo sapiens
HEFYK

SEQ ID NO: 324 - protein, 5 aa, Homo sapiens
YLFPC

SEQ ID NO: 325 - protein, 5 aa, Homo sapiens
DLHTL

SEQ ID NO: 326 - protein, 5 aa, Homo sapiens
QRLGG

SEQ ID NO: 327 - protein, 5 aa, Homo sapiens
NKESF

SEQ ID NO: 328 - protein, 5 aa, Homo sapiens
PSGWH

SEQ ID NO: 329 - protein, 5 aa, Homo sapiens
PGAPF

SEQ ID NO: 330 - protein, 5 aa, Homo sapiens
PSRAE

SEQ ID NO: 331 - protein, 5 aa, Homo sapiens
GGTPK

SEQ ID NO: 332 - protein, 5 aa, Homo sapiens
EKPNK

SEQ ID NO: 333 - protein, 5 aa, Homo sapiens
ERKCP

SEQ ID NO: 334 - protein, 5 aa, Homo sapiens
AATGR

SEQ ID NO: 335 - protein, 5 aa, Homo sapiens
RCGAS

SEQ ID NO: 336 - protein, 5 aa, Homo sapiens
PLLKF

SEQ ID NO: 337 - protein, 5 aa, Homo sapiens
AAARS

SEQ ID NO: 338 - protein, 5 aa, Homo sapiens
KNTTD

SEQ ID NO: 339 - protein, 5 aa, Homo sapiens
EKTQQ

SEQ ID NO: 340 - protein, 5 aa, Homo sapiens
HLAGS

SEQ ID NO: 341 - protein, 5 aa, Homo sapiens
WDLIT

SEQ ID NO: 342 - protein, 5 aa, Homo sapiens
PSLLR

SEQ ID NO: 343 - protein, 5 aa, Homo sapiens
GPQSA

SEQ ID NO: 344 - protein, 5 aa, Homo sapiens
HQALD

SEQ ID NO: 345 - protein, 5 aa, Homo sapiens
QPYGK

SEQ ID NO: 346 - protein, 5 aa, Homo sapiens
SGGQS

SEQ ID NO: 347 - protein, 5 aa, Homo sapiens
PDEAI

SEQ ID NO: 348 - protein, 5 aa, Homo sapiens
APGGS

SEQ ID NO: 349 - protein, 5 aa, Homo sapiens
MKMKF

SEQ ID NO: 350 - protein, 5 aa, Homo sapiens
IISRN

SEQ ID NO: 351 - protein, 5 aa, Homo sapiens
SSQDG

SEQ ID NO: 352 - protein, 5 aa, Homo sapiens
SSGTA

SEQ ID NO: 353 - protein, 5 aa, Homo sapiens
EENFV

SEQ ID NO: 354 - protein, 5 aa, Homo sapiens
PRRHL

SEQ ID NO: 355 - protein, 5 aa, Homo sapiens
LAAYI

SEQ ID NO: 356 - protein, 5 aa, Homo sapiens
STEVD

SEQ ID NO: 357 - protein, 5 aa, Homo sapiens
YQIRV

SEQ ID NO: 358 - protein, 5 aa, Homo sapiens
VTDTP

SEQ ID NO: 359 - protein, 5 aa, Homo sapiens
LRTKN

SEQ ID NO: 360 - protein, 5 aa, Homo sapiens
VEENI

SEQ ID NO: 361 - protein, 5 aa, Homo sapiens
NTDFE

SEQ ID NO: 362 - protein, 5 aa, Homo sapiens
IRMQP

SEQ ID NO: 363 - protein, 5 aa, Homo sapiens
FLPRL

SEQ ID NO: 364 - protein, 5 aa, Homo sapiens
QQDSM

SEQ ID NO: 365 - protein, 5 aa, Homo sapiens
RTIHC

SEQ ID NO: 366 - protein, 5 aa, Homo sapiens
RSQDD

SEQ ID NO: 367 - protein, 5 aa, Homo sapiens
AVFSL

SEQ ID NO: 368 - protein, 5 aa, Homo sapiens
LFYQS

SEQ ID NO: 369 - protein, 5 aa, Homo sapiens
AKTKR

SEQ ID NO: 370 - protein, 5 aa, Homo sapiens
ESSEP

SEQ ID NO: 371 - protein, 5 aa, Homo sapiens
PLRRQ

SEQ ID NO: 372 - protein, 5 aa, Homo sapiens
YMRVS

SEQ ID NO: 373 - protein, 5 aa, Homo sapiens
QNCTC

SEQ ID NO: 374 - protein, 5 aa, Homo sapiens
RVRPR

SEQ ID NO: 375 - protein, 5 aa, Homo sapiens
SSMIG

SEQ ID NO: 376 - protein, 5 aa, Homo sapiens
AGQKR

SEQ ID NO: 377 - protein, 5 aa, Homo sapiens
PGAVY

SEQ ID NO: 378 - protein, 5 aa, Homo sapiens
ATSPV

SEQ ID NO: 379 - protein, 5 aa, Homo sapiens
YVEAI

SEQ ID NO: 380 - protein, 5 aa, Homo sapiens
KCKKA

SEQ ID NO: 381 - protein, 5 aa, Homo sapiens
LLSKV

SEQ ID NO: 382 - protein, 5 aa, Homo sapiens
ENDFS

SEQ ID NO: 383 - protein, 5 aa, Homo sapiens
MKRHL

SEQ ID NO: 384 - protein, 5 aa, Homo sapiens
GFSYG

SEQ ID NO: 385 - protein, 5 aa, Homo sapiens
TLKLA

SEQ ID NO: 386 - protein, 5 aa, Homo sapiens
FQVRT

SEQ ID NO: 387 - protein, 5 aa, Homo sapiens
PYLPA

SEQ ID NO: 388 - protein, 5 aa, Homo sapiens
SAVKA

SEQ ID NO: 389 - protein, 5 aa, Homo sapiens
EWTRV

SEQ ID NO: 390 - protein, 5 aa, Homo sapiens
LRACC

SEQ ID NO: 391 - protein, 5 aa, Homo sapiens
TLRPR

SEQ ID NO: 392 - protein, 5 aa, Homo sapiens
SADAS

SEQ ID NO: 393 - protein, 5 aa, Homo sapiens
EKPCT

SEQ ID NO: 394 - protein, 5 aa, Homo sapiens
NYFPN

SEQ ID NO: 395 - protein, 5 aa, Homo sapiens
KGTPV

SEQ ID NO: 396 - protein, 5 aa, Homo sapiens
TEAHA

SEQ ID NO: 397 - protein, 5 aa, Homo sapiens
QQGPP

SEQ ID NO: 398 - protein, 5 aa, Homo sapiens
LTETR

SEQ ID NO: 399 - protein, 5 aa, Homo sapiens
LLMYT

SEQ ID NO: 400 - protein, 5 aa, Homo sapiens
VFLTA

SEQ ID NO: 401 - protein, 5 aa, Homo sapiens
QQMAP

SEQ ID NO: 402 - protein, 5 aa, Homo sapiens
VIRNV

SEQ ID NO: 403 - protein, 5 aa, Homo sapiens
QAQES

SEQ ID NO: 404 - protein, 5 aa, Homo sapiens
RGLPY

SEQ ID NO: 405 - protein, 5 aa, Homo sapiens
DIEIL

SEQ ID NO: 406 - protein, 5 aa, Homo sapiens
RGLSD

SEQ ID NO: 407 - protein, 5 aa, Homo sapiens
STLKV

SEQ ID NO: 408 - protein, 5 aa, Homo sapiens
KLKSP

SEQ ID NO: 409 - protein, 5 aa, Homo sapiens
KHDYV

SEQ ID NO: 410 - protein, 5 aa, Homo sapiens
RVQLE

SEQ ID NO: 411 - protein, 5 aa, Homo sapiens
FHLSY

SEQ ID NO: 412 - protein, 5 aa, Homo sapiens
GLTNQ

SEQ ID NO: 413 - protein, 5 aa, Homo sapiens
LSLPN

SEQ ID NO: 414 - protein, 5 aa, Homo sapiens
RLSRS

SEQ ID NO: 415 - protein, 5 aa, Homo sapiens
QKYAM

SEQ ID NO: 416 - protein, 5 aa, Homo sapiens
EVVTI

SEQ ID NO: 417 - protein, 5 aa, Homo sapiens
FPHEN

SEQ ID NO: 418 - protein, 5 aa, Homo sapiens
WQVKF

SEQ ID NO: 419 - protein, 5 aa, Homo sapiens
DSSIS

SEQ ID NO: 420 - protein, 5 aa, Homo sapiens
AKKAD

SEQ ID NO: 421 - protein, 5 aa, Homo sapiens
TEGTR

SEQ ID NO: 422 - protein, 5 aa, Homo sapiens
FLNDI

SEQ ID NO: 423 - protein, 5 aa, Homo sapiens
EKFDI

SEQ ID NO: 424 - protein, 5 aa, Homo sapiens
IWDVQ

SEQ ID NO: 425 - protein, 5 aa, Homo sapiens
FSLSD

SEQ ID NO: 426 - protein, 5 aa, Homo sapiens
QPQVH

SEQ ID NO: 427 - protein, 5 aa, Homo sapiens
LNTSS

SEQ ID NO: 428 - protein, 5 aa, Homo sapiens
HQGPL

SEQ ID NO: 429 - protein, 5 aa, Homo sapiens
QNSAF

SEQ ID NO: 430 - protein, 5 aa, Homo sapiens
IFSNF

SEQ ID NO: 431 - protein, 5 aa, Homo sapiens
PFLGA

SEQ ID NO: 432 - protein, 5 aa, Homo sapiens
PFFEL

SEQ ID NO: 433 - protein, 5 aa, Homo sapiens
QENSN

SEQ ID NO: 434 - protein, 5 aa, Homo sapiens
QVEEV

SEQ ID NO: 435 - protein, 5 aa, Homo sapiens
PIQLS

SEQ ID NO: 436 - protein, 5 aa, Homo sapiens
PIIQK

SEQ ID NO: 437 - protein, 5 aa, Homo sapiens
RLGFG

SEQ ID NO: 438 - protein, 5 aa, Homo sapiens
NETMP

SEQ ID NO: 439 - protein, 5 aa, Homo sapiens
SLVFS

SEQ ID NO: 440 - protein, 5 aa, Homo sapiens
SFEFT

SEQ ID NO: 441 - protein, 5 aa, Homo sapiens
SNLSS

SEQ ID NO: 442 - protein, 5 aa, Homo sapiens
SYWEF

SEQ ID NO: 443 - protein, 5 aa, Homo sapiens
SPEKL

SEQ ID NO: 444 - protein, 5 aa, Homo sapiens
EEMCD

SEQ ID NO: 445 - protein, 5 aa, Homo sapiens
TAVHQ

SEQ ID NO: 446 - protein, 5 aa, Homo sapiens
IKDFL

SEQ ID NO: 447 - protein, 5 aa, Homo sapiens
GMIKT

SEQ ID NO: 448 - protein, 5 aa, Homo sapiens
ALAKS

SEQ ID NO: 449 - protein, 5 aa, Homo sapiens
SFVDP

SEQ ID NO: 450 - protein, 5 aa, Homo sapiens
PRARN

SEQ ID NO: 451 - protein, 5 aa, Homo sapiens
QQIAN

SEQ ID NO: 452 - protein, 5 aa, Homo sapiens
QPAEV

SEQ ID NO: 453 - protein, 5 aa, Homo sapiens
RSNIV

SEQ ID NO: 454 - protein, 5 aa, Homo sapiens
IREST

SEQ ID NO: 455 - protein, 5 aa, Homo sapiens
AKSNR

SEQ ID NO: 456 - protein, 5 aa, Homo sapiens
GNGKQ

SEQ ID NO: 457 - protein, 5 aa, Homo sapiens
APYEI

SEQ ID NO: 458 - protein, 5 aa, Homo sapiens
SVLKA

SEQ ID NO: 459 - protein, 5 aa, Homo sapiens
QATLL

SEQ ID NO: 460 - protein, 5 aa, Homo sapiens
KQQKQ

SEQ ID NO: 461 - protein, 5 aa, Homo sapiens
QPSPL

SEQ ID NO: 462 - protein, 5 aa, Homo sapiens
HLEFC

SEQ ID NO: 463 - protein, 5 aa, Homo sapiens
RDECK

SEQ ID NO: 464 - protein, 5 aa, Homo sapiens
RGTKA

SEQ ID NO: 465 - protein, 5 aa, Homo sapiens
GIHFS

SEQ ID NO: 466 - protein, 5 aa, Homo sapiens
DGGVG

SEQ ID NO: 467 - protein, 5 aa, Homo sapiens
DPEEN

SEQ ID NO: 468 - protein, 5 aa, Homo sapiens
EDCSW

SEQ ID NO: 469 - protein, 5 aa, Homo sapiens
RASGQ

SEQ ID NO: 470 - protein, 5 aa, Homo sapiens
VSEYR

SEQ ID NO: 471 - protein, 5 aa, Homo sapiens
RVALI

SEQ ID NO: 472 - protein, 5 aa, Homo sapiens
KHSSP

SEQ ID NO: 473 - protein, 5 aa, Homo sapiens
KKKAT

SEQ ID NO: 474 - protein, 5 aa, Homo sapiens
LAKIK

SEQ ID NO: 475 - protein, 5 aa, Homo sapiens
QFFQT

SEQ ID NO: 476 - protein, 5 aa, Homo sapiens
SGRRG

SEQ ID NO: 477 - protein, 5 aa, Homo sapiens
VTTDC

SEQ ID NO: 478 - protein, 5 aa, Homo sapiens
RSGGA

SEQ ID NO: 479 - protein, 5 aa, Homo sapiens
LITAF

SEQ ID NO: 480 - protein, 5 aa, Homo sapiens
LQSLS

SEQ ID NO: 481 - protein, 5 aa, Homo sapiens
CSCCQ

SEQ ID NO: 482 - protein, 5 aa, Homo sapiens
ENNTH

SEQ ID NO: 483 - protein, 5 aa, Homo sapiens
EKHRK

SEQ ID NO: 484 - protein, 5 aa, Homo sapiens
HPRPS

SEQ ID NO: 485 - protein, 5 aa, Homo sapiens
EMEVI

SEQ ID NO: 486 - protein, 5 aa, Homo sapiens
GVYIR

SEQ ID NO: 487 - protein, 5 aa, Homo sapiens
NLAVL

SEQ ID NO: 488 - protein, 5 aa, Homo sapiens
VILKG

SEQ ID NO: 489 - protein, 5 aa, Homo sapiens
QRTLA

SEQ ID NO: 490 - protein, 5 aa, Homo sapiens
VATAK

SEQ ID NO: 491 - protein, 5 aa, Homo sapiens
LSGTD

SEQ ID NO: 492 - protein, 5 aa, Homo sapiens
HKLVF

SEQ ID NO: 493 - protein, 5 aa, Homo sapiens
SHESQ

SEQ ID NO: 494 - protein, 5 aa, Homo sapiens
KQKVK

SEQ ID NO: 495 - protein, 5 aa, Homo sapiens
HLKSM

SEQ ID NO: 496 - protein, 5 aa, Homo sapiens
LIDPC

SEQ ID NO: 497 - protein, 5 aa, Homo sapiens
PESDS

SEQ ID NO: 498 - protein, 5 aa, Homo sapiens
QKLCS

SEQ ID NO: 499 - protein, 5 aa, Homo sapiens
FWLRF

SEQ ID NO: 500 - protein, 5 aa, Homo sapiens
AEDHL

SEQ ID NO: 501 - protein, 5 aa, Homo sapiens
EPEQL

SEQ ID NO: 502 - protein, 5 aa, Homo sapiens
RRYDW

SEQ ID NO: 503 - protein, 5 aa, Homo sapiens
AADKH

SEQ ID NO: 504 - protein, 5 aa, Homo sapiens
ARPRA

SEQ ID NO: 505 - protein, 5 aa, Homo sapiens
DNGWD

SEQ ID NO: 506 - protein, 5 aa, Homo sapiens
DGELP

SEQ ID NO: 507 - protein, 5 aa, Homo sapiens
AVKLH

SEQ ID NO: 508 - protein, 5 aa, Homo sapiens
SQEEQ

SEQ ID NO: 509 - protein, 5 aa, Homo sapiens
EAEGS

SEQ ID NO: 510 - protein, 5 aa, Homo sapiens
LSQEG

SEQ ID NO: 511 - protein, 5 aa, Homo sapiens
LLVEH

SEQ ID NO: 512 - protein, 5 aa, Homo sapiens
LRGSL

SEQ ID NO: 513 - protein, 5 aa, Homo sapiens
EGPGE

SEQ ID NO: 514 - protein, 5 aa, Homo sapiens
IYYKV

SEQ ID NO: 515 - protein, 5 aa, Homo sapiens
TGSPA

SEQ ID NO: 516 - protein, 5 aa, Homo sapiens
LESTF

SEQ ID NO: 517 - protein, 5 aa, Homo sapiens
APFHM

SEQ ID NO: 518 - protein, 5 aa, Homo sapiens
ILSVK

SEQ ID NO: 519 - protein, 5 aa, Homo sapiens
FSKDL

SEQ ID NO: 520 - protein, 5 aa, Homo sapiens
GGNQK

SEQ ID NO: 521 - protein, 5 aa, Homo sapiens
KSINF

SEQ ID NO: 522 - protein, 5 aa, Homo sapiens
ESGLV

SEQ ID NO: 523 - protein, 5 aa, Homo sapiens
EPLNA

SEQ ID NO: 524 - protein, 5 aa, Homo sapiens
EITLL

SEQ ID NO: 525 - protein, 5 aa, Homo sapiens
DVKPC

SEQ ID NO: 526 - protein, 5 aa, Homo sapiens
LPPTS

SEQ ID NO: 527 - protein, 5 aa, Homo sapiens
FPATV

SEQ ID NO: 528 - protein, 5 aa, Homo sapiens
SSSES

SEQ ID NO: 529 - protein, 5 aa, Homo sapiens
LATDG

SEQ ID NO: 530 - protein, 5 aa, Homo sapiens
HGYPY

SEQ ID NO: 531 - protein, 5 aa, Homo sapiens
RSGTR

SEQ ID NO: 532 - protein, 5 aa, Homo sapiens
SKVYR

SEQ ID NO: 533 - protein, 5 aa, Homo sapiens
VGGCS

SEQ ID NO: 534 - protein, 5 aa, Homo sapiens
VTWRD

SEQ ID NO: 535 - protein, 5 aa, Homo sapiens
PNPAL

SEQ ID NO: 536 - protein, 5 aa, Homo sapiens
HYIGH

SEQ ID NO: 537 - protein, 5 aa, Homo sapiens
EDLFS

SEQ ID NO: 538 - protein, 5 aa, Homo sapiens
SRGGA

SEQ ID NO: 539 - protein, 5 aa, Homo sapiens
HILSV

SEQ ID NO: 540 - protein, 5 aa, Homo sapiens
QLELA

SEQ ID NO: 541 - protein, 5 aa, Homo sapiens
LRPAP

SEQ ID NO: 542 - protein, 5 aa, Homo sapiens
SEAGP

SEQ ID NO: 543 - protein, 5 aa, Homo sapiens
PATRP

SEQ ID NO: 544 - protein, 5 aa, Homo sapiens
SGKFQ

SEQ ID NO: 545 - protein, 5 aa, Homo sapiens
RGPPE

SEQ ID NO: 546 - protein, 5 aa, Homo sapiens
NRDME

SEQ ID NO: 547 - protein, 5 aa, Homo sapiens
TILMF

SEQ ID NO: 548 - protein, 5 aa, Homo sapiens
IQKHA

SEQ ID NO: 549 - protein, 5 aa, Homo sapiens
ATGLP

SEQ ID NO: 550 - protein, 5 aa, Homo sapiens
PHSHL

SEQ ID NO: 551 - protein, 5 aa, Homo sapiens
ETAKS

SEQ ID NO: 552 - protein, 5 aa, Homo sapiens
ESHIW

SEQ ID NO: 553 - protein, 5 aa, Homo sapiens
PCNSY

SEQ ID NO: 554 - protein, 5 aa, Homo sapiens
EKNED

SEQ ID NO: 555 - protein, 5 aa, Homo sapiens
SCCRP

SEQ ID NO: 556 - protein, 5 aa, Homo sapiens
VEGAE

SEQ ID NO: 557 - protein, 5 aa, Homo sapiens
KKIKS

SEQ ID NO: 558 - protein, 5 aa, Homo sapiens
DESSV

SEQ ID NO: 559 - protein, 5 aa, Homo sapiens
KVNGT

SEQ ID NO: 560 - protein, 5 aa, Homo sapiens
KIFRF

SEQ ID NO: 561 - protein, 5 aa, Homo sapiens
ENKIY

SEQ ID NO: 562 - protein, 5 aa, Homo sapiens
SGMKL

SEQ ID NO: 563 - protein, 5 aa, Homo sapiens
VLLLL

SEQ ID NO: 564 - protein, 5 aa, Homo sapiens
VSKKK

SEQ ID NO: 565 - protein, 5 aa, Homo sapiens
GLWSG

SEQ ID NO: 566 - protein, 5 aa, Homo sapiens
MNLEF

SEQ ID NO: 567 - protein, 5 aa, Homo sapiens
FQKML

SEQ ID NO: 568 - protein, 5 aa, Homo sapiens
AKALK

SEQ ID NO: 569 - protein, 5 aa, Homo sapiens
LHPGI

SEQ ID NO: 570 - protein, 5 aa, Homo sapiens
TPWYQ

SEQ ID NO: 571 - protein, 5 aa, Homo sapiens
PSNKS

SEQ ID NO: 572 - protein, 5 aa, Homo sapiens
SSSTA

SEQ ID NO: 573 - protein, 5 aa, Homo sapiens
LELLN

SEQ ID NO: 574 - protein, 5 aa, Homo sapiens
RPVPT

SEQ ID NO: 575 - protein, 5 aa, Homo sapiens
VHSAE

SEQ ID NO: 576 - protein, 5 aa, Homo sapiens
GSVYF

SEQ ID NO: 577 - protein, 5 aa, Homo sapiens
LEMIV

SEQ ID NO: 578 - protein, 5 aa, Homo sapiens
GTLGL

SEQ ID NO: 579 - protein, 5 aa, Homo sapiens
VSANT

SEQ ID NO: 580 - protein, 5 aa, Homo sapiens
TLLGS

SEQ ID NO: 581 - protein, 5 aa, Homo sapiens
VKALE

SEQ ID NO: 582 - protein, 5 aa, Homo sapiens
PVLVS

SEQ ID NO: 583 - protein, 5 aa, Homo sapiens
FQGQG

SEQ ID NO: 584 - protein, 5 aa, Homo sapiens
HFAPC

SEQ ID NO: 585 - protein, 5 aa, Homo sapiens
EETPV

SEQ ID NO: 586 - protein, 5 aa, Homo sapiens
PKVAL

SEQ ID NO: 587 - protein, 5 aa, Homo sapiens
IPFLL

SEQ ID NO: 588 - protein, 5 aa, Homo sapiens
ERANM

SEQ ID NO: 589 - protein, 5 aa, Homo sapiens
GTEES

SEQ ID NO: 590 - protein, 5 aa, Homo sapiens
SEEDD

SEQ ID NO: 591 - protein, 5 aa, Homo sapiens
YRLVQ

SEQ ID NO: 592 - protein, 5 aa, Homo sapiens
TYFFS

SEQ ID NO: 593 - protein, 5 aa, Homo sapiens
SLQER

SEQ ID NO: 594 - protein, 5 aa, Homo sapiens
KETPL

SEQ ID NO: 595 - protein, 5 aa, Homo sapiens
NPSRS

SEQ ID NO: 596 - protein, 5 aa, Homo sapiens
KVRQL

SEQ ID NO: 597 - protein, 5 aa, Homo sapiens
LGADI

SEQ ID NO: 598 - protein, 5 aa, Homo sapiens
SSSMA

SEQ ID NO: 599 - protein, 5 aa, Homo sapiens
ANTFL

SEQ ID NO: 600 - protein, 5 aa, Homo sapiens
NSTFA

SEQ ID NO: 601 - protein, 5 aa, Homo sapiens
FIYFI

SEQ ID NO: 602 - protein, 5 aa, Homo sapiens
VMTFL

SEQ ID NO: 603 - protein, 5 aa, Homo sapiens
IARIP

SEQ ID NO: 604 - protein, 5 aa, Homo sapiens
GQLPR

SEQ ID NO: 605 - protein, 5 aa, Homo sapiens
EDTYL

SEQ ID NO: 606 - protein, 5 aa, Homo sapiens
GGRKK

SEQ ID NO: 607 - protein, 5 aa, Homo sapiens
MKMEC

SEQ ID NO: 608 - protein, 5 aa, Homo sapiens
ELTPV

SEQ ID NO: 609 - protein, 5 aa, Homo sapiens
FQKRR

SEQ ID NO: 610 - protein, 5 aa, Homo sapiens
PGYRS

SEQ ID NO: 611 - protein, 5 aa, Homo sapiens
RLVSW

SEQ ID NO: 612 - protein, 5 aa, Homo sapiens
RFPSS

SEQ ID NO: 613 - protein, 5 aa, Homo sapiens
FHPSN

SEQ ID NO: 614 - protein, 5 aa, Homo sapiens
RAWNC

SEQ ID NO: 615 - protein, 5 aa, Homo sapiens
VWKTD

SEQ ID NO: 616 - protein, 5 aa, Homo sapiens
KSWSQ

SEQ ID NO: 617 - protein, 5 aa, Homo sapiens
FKLKE

SEQ ID NO: 618 - protein, 5 aa, Homo sapiens
FAPGR

SEQ ID NO: 619 - protein, 5 aa, Homo sapiens
CVAFD

SEQ ID NO: 620 - protein, 5 aa, Homo sapiens
GTPGA

SEQ ID NO: 621 - protein, 5 aa, Homo sapiens
PSATD

SEQ ID NO: 622 - protein, 5 aa, Homo sapiens
EEDDE

SEQ ID NO: 623 - protein, 5 aa, Homo sapiens
EPAGY

SEQ ID NO: 624 - protein, 5 aa, Homo sapiens
TEPPK

SEQ ID NO: 625 - protein, 5 aa, Homo sapiens
SMEKR

SEQ ID NO: 626 - protein, 5 aa, Homo sapiens
ERLLV

SEQ ID NO: 627 - protein, 5 aa, Homo sapiens
PRDKS

SEQ ID NO: 628 - protein, 5 aa, Homo sapiens
LIITD

SEQ ID NO: 629 - protein, 5 aa, Homo sapiens
SLEDL

SEQ ID NO: 630 - protein, 5 aa, Homo sapiens
LPMPI

SEQ ID NO: 631 - protein, 5 aa, Homo sapiens
PPSRK

SEQ ID NO: 632 - protein, 5 aa, Homo sapiens
GDAKE

SEQ ID NO: 633 - protein, 5 aa, Homo sapiens
KKIPL

SEQ ID NO: 634 - protein, 5 aa, Homo sapiens
SRKRK

SEQ ID NO: 635 - protein, 5 aa, Homo sapiens
LPGKI

SEQ ID NO: 636 - protein, 5 aa, Homo sapiens
IEFKP

SEQ ID NO: 637 - protein, 5 aa, Homo sapiens
AVIKG

SEQ ID NO: 638 - protein, 5 aa, Homo sapiens
WRTDV

SEQ ID NO: 639 - protein, 5 aa, Homo sapiens
PASGC

SEQ ID NO: 640 - protein, 5 aa, Homo sapiens
LNGPV

SEQ ID NO: 641 - protein, 5 aa, Homo sapiens
GEPAH

SEQ ID NO: 642 - protein, 5 aa, Homo sapiens
VWKCS

SEQ ID NO: 643 - protein, 5 aa, Homo sapiens
LKSKK

SEQ ID NO: 644 - protein, 5 aa, Homo sapiens
GILSW

SEQ ID NO: 645 - protein, 5 aa, Homo sapiens
TRRKK

SEQ ID NO: 646 - protein, 5 aa, Homo sapiens
GPGPP

SEQ ID NO: 647 - protein, 5 aa, Homo sapiens
REILQ

SEQ ID NO: 648 - protein, 5 aa, Homo sapiens
RCSLM

SEQ ID NO: 649 - protein, 5 aa, Homo sapiens
IMPGL

SEQ ID NO: 650 - protein, 5 aa, Homo sapiens
HLLLK

SEQ ID NO: 651 - protein, 5 aa, Homo sapiens
GLYAM

SEQ ID NO: 652 - protein, 5 aa, Homo sapiens
ISPLQ

SEQ ID NO: 653 - protein, 5 aa, Homo sapiens
LYRLK

SEQ ID NO: 654 - protein, 5 aa, Homo sapiens
KCTIQ

SEQ ID NO: 655 - protein, 5 aa, Homo sapiens
VTCLV

SEQ ID NO: 656 - protein, 5 aa, Homo sapiens
RSGKF

SEQ ID NO: 657 - protein, 5 aa, Homo sapiens
LTSTS

SEQ ID NO: 658 - protein, 5 aa, Homo sapiens
RSGMK

SEQ ID NO: 659 - protein, 5 aa, Homo sapiens
VVTAP

SEQ ID NO: 660 - protein, 5 aa, Homo sapiens
QALLF

SEQ ID NO: 661 - protein, 5 aa, Homo sapiens
PTHQA

SEQ ID NO: 662 - protein, 5 aa, Homo sapiens
ADQEL

SEQ ID NO: 663 - protein, 5 aa, Homo sapiens
LEKSL

SEQ ID NO: 664 - protein, 5 aa, Homo sapiens
AKPAE

SEQ ID NO: 665 - protein, 5 aa, Homo sapiens
KKLIG

SEQ ID NO: 666 - protein, 5 aa, Homo sapiens
NKEEL

SEQ ID NO: 667 - protein, 5 aa, Homo sapiens
EEEET

SEQ ID NO: 668 - protein, 5 aa, Homo sapiens
AELCL

SEQ ID NO: 669 - protein, 5 aa, Homo sapiens
PGLGL

SEQ ID NO: 670 - protein, 5 aa, Homo sapiens
LVAES

SEQ ID NO: 671 - protein, 5 aa, Homo sapiens
SKLQD

SEQ ID NO: 672 - protein, 5 aa, Homo sapiens
DAGGS

SEQ ID NO: 673 - protein, 5 aa, Homo sapiens
FGGQA

SEQ ID NO: 674 - protein, 5 aa, Homo sapiens
PTHLV

SEQ ID NO: 675 - protein, 5 aa, Homo sapiens
QKYGH

SEQ ID NO: 676 - protein, 5 aa, Homo sapiens
QETDD

SEQ ID NO: 677 - protein, 5 aa, Homo sapiens
EKGRL

SEQ ID NO: 678 - protein, 5 aa, Homo sapiens
GFKKR

SEQ ID NO: 679 - protein, 5 aa, Homo sapiens
TAHEA

SEQ ID NO: 680 - protein, 5 aa, Homo sapiens
PDSHS

SEQ ID NO: 681 - protein, 5 aa, Homo sapiens
IYFQY

SEQ ID NO: 682 - protein, 5 aa, Homo sapiens
PHLVA

SEQ ID NO: 683 - protein, 5 aa, Homo sapiens
NHSGK

SEQ ID NO: 684 - protein, 5 aa, Homo sapiens
LRLNR

SEQ ID NO: 685 - protein, 5 aa, Homo sapiens
PTGRK

SEQ ID NO: 686 - protein, 5 aa, Homo sapiens
KRRKH

SEQ ID NO: 687 - protein, 5 aa, Homo sapiens
KKKRK

SEQ ID NO: 688 - protein, 5 aa, Homo sapiens
CDSVD

SEQ ID NO: 689 - protein, 5 aa, Homo sapiens
LVDID

SEQ ID NO: 690 - protein, 5 aa, Homo sapiens
METPL

SEQ ID NO: 691 - protein, 5 aa, Homo sapiens
TMKRL

SEQ ID NO: 692 - protein, 5 aa, Homo sapiens
LESQQ

SEQ ID NO: 693 - protein, 5 aa, Homo sapiens
TTPIY

SEQ ID NO: 694 - protein, 5 aa, Homo sapiens
KLQGF

SEQ ID NO: 695 - protein, 5 aa, Homo sapiens
AETPQ

SEQ ID NO: 696 - protein, 5 aa, Homo sapiens
KVNGN

SEQ ID NO: 697 - protein, 5 aa, Homo sapiens
DYKPV

SEQ ID NO: 698 - protein, 5 aa, Homo sapiens
RRFLK

SEQ ID NO: 699 - protein, 5 aa, Homo sapiens
VLVSS

SEQ ID NO: 700 - protein, 5 aa, Homo sapiens
KPKTL

SEQ ID NO: 701 - protein, 5 aa, Homo sapiens
DLLFE

SEQ ID NO: 702 - protein, 5 aa, Homo sapiens
FFDQE

SEQ ID NO: 703 - protein, 5 aa, Homo sapiens
IKKLT

SEQ ID NO: 704 - protein, 5 aa, Homo sapiens
TSTSP

SEQ ID NO: 705 - protein, 5 aa, Homo sapiens
DLLSL

SEQ ID NO: 706 - protein, 5 aa, Homo sapiens
DDDNM

SEQ ID NO: 707 - protein, 5 aa, Homo sapiens
FFRSH

SEQ ID NO: 708 - protein, 5 aa, Homo sapiens
LGQPR

SEQ ID NO: 709 - protein, 5 aa, Homo sapiens
TELRA

SEQ ID NO: 710 - protein, 5 aa, Homo sapiens
IYYTS

SEQ ID NO: 711 - protein, 5 aa, Homo sapiens
PCTEP

SEQ ID NO: 712 - protein, 5 aa, Homo sapiens
GARLF

SEQ ID NO: 713 - protein, 5 aa, Homo sapiens
EETED

SEQ ID NO: 714 - protein, 5 aa, Homo sapiens
EPNFL

SEQ ID NO: 715 - protein, 5 aa, Homo sapiens
INPDS

SEQ ID NO: 716 - protein, 5 aa, Homo sapiens
ALRRG

SEQ ID NO: 717 - protein, 5 aa, Homo sapiens
DMQDL

SEQ ID NO: 718 - protein, 5 aa, Homo sapiens
QQAGK

SEQ ID NO: 719 - protein, 5 aa, Homo sapiens
VDSGN

SEQ ID NO: 720 - protein, 5 aa, Homo sapiens
SPCTA

SEQ ID NO: 721 - protein, 5 aa, Homo sapiens
DIDAI

SEQ ID NO: 722 - protein, 5 aa, Homo sapiens
ESRDQ

SEQ ID NO: 723 - protein, 5 aa, Homo sapiens
VNGLF

SEQ ID NO: 724 - protein, 5 aa, Homo sapiens
LLPDD

SEQ ID NO: 725 - protein, 5 aa, Homo sapiens
LFWRN

SEQ ID NO: 726 - protein, 5 aa, Homo sapiens
KRVQK

SEQ ID NO: 727 - protein, 5 aa, Homo sapiens
LYLAL

SEQ ID NO: 728 - protein, 5 aa, Homo sapiens
WYSPY

SEQ ID NO: 729 - protein, 5 aa, Homo sapiens
TSLAP

SEQ ID NO: 730 - protein, 5 aa, Homo sapiens
GHRAL

SEQ ID NO: 731 - protein, 5 aa, Homo sapiens
GFNNM

SEQ ID NO: 732 - protein, 5 aa, Homo sapiens
PSPSP

SEQ ID NO: 733 - protein, 5 aa, Homo sapiens
RVHKM

SEQ ID NO: 734 - protein, 5 aa, Homo sapiens
QRLTL

SEQ ID NO: 735 - protein, 5 aa, Homo sapiens
GNGNA

SEQ ID NO: 736 - protein, 5 aa, Homo sapiens
SIKHS

SEQ ID NO: 737 - protein, 5 aa, Homo sapiens
AEWVS

SEQ ID NO: 738 - protein, 5 aa, Homo sapiens
KDKRR

SEQ ID NO: 739 - protein, 5 aa, Homo sapiens
SSVLT

SEQ ID NO: 740 - protein, 5 aa, Homo sapiens
AFCQR

SEQ ID NO: 741 - protein, 5 aa, Homo sapiens
ASKQS

SEQ ID NO: 742 - protein, 5 aa, Homo sapiens
DSIPD

SEQ ID NO: 743 - protein, 5 aa, Homo sapiens
NPYPV

SEQ ID NO: 744 - protein, 5 aa, Homo sapiens
NIPRD

SEQ ID NO: 745 - protein, 5 aa, Homo sapiens
GGRRC

SEQ ID NO: 746 - protein, 5 aa, Homo sapiens
TLILS

SEQ ID NO: 747 - protein, 5 aa, Homo sapiens
KFTWF

SEQ ID NO: 748 - protein, 5 aa, Homo sapiens
KAYMH

SEQ ID NO: 749 - protein, 5 aa, Homo sapiens
KIAVS

SEQ ID NO: 750 - protein, 5 aa, Homo sapiens
RSTTD

SEQ ID NO: 751 - protein, 5 aa, Homo sapiens
DPAPF

SEQ ID NO: 752 - protein, 5 aa, Homo sapiens
KAPEK

SEQ ID NO: 753 - protein, 5 aa, Homo sapiens
GDPIV

SEQ ID NO: 754 - protein, 5 aa, Homo sapiens
EDKGH

SEQ ID NO: 755 - protein, 5 aa, Homo sapiens
LQSSV

SEQ ID NO: 756 - protein, 5 aa, Homo sapiens
RTFLS

SEQ ID NO: 757 - protein, 5 aa, Homo sapiens
LRVHF

SEQ ID NO: 758 - protein, 5 aa, Homo sapiens
QKAGK

SEQ ID NO: 759 - protein, 5 aa, Homo sapiens
YENPT

SEQ ID NO: 760 - protein, 5 aa, Homo sapiens
HRCHP

SEQ ID NO: 761 - protein, 5 aa, Homo sapiens
VVLYG

SEQ ID NO: 762 - protein, 5 aa, Homo sapiens
RNGTK

SEQ ID NO: 763 - protein, 5 aa, Homo sapiens
LHCPA

SEQ ID NO: 764 - protein, 5 aa, Homo sapiens
GQPPQ

SEQ ID NO: 765 - protein, 5 aa, Homo sapiens
PGLQP

SEQ ID NO: 766 - protein, 5 aa, Homo sapiens
CIRLK

SEQ ID NO: 767 - protein, 5 aa, Homo sapiens
TGGQD

SEQ ID NO: 768 - protein, 5 aa, Homo sapiens
YETTV

SEQ ID NO: 769 - protein, 5 aa, Homo sapiens
ELFDA

SEQ ID NO: 770 - protein, 5 aa, Homo sapiens
AVKID

SEQ ID NO: 771 - protein, 5 aa, Homo sapiens
AWLLS

SEQ ID NO: 772 - protein, 5 aa, Homo sapiens
LGLLA

SEQ ID NO: 773 - protein, 5 aa, Homo sapiens
TFSQR

SEQ ID NO: 774 - protein, 5 aa, Homo sapiens
SRPSN

SEQ ID NO: 775 - protein, 5 aa, Homo sapiens
WAGSM

SEQ ID NO: 776 - protein, 5 aa, Homo sapiens
QYMRV

SEQ ID NO: 777 - protein, 5 aa, Homo sapiens
TNAED

SEQ ID NO: 778 - protein, 5 aa, Homo sapiens
RCQEA

SEQ ID NO: 779 - protein, 5 aa, Homo sapiens
DHYRY

SEQ ID NO: 780 - protein, 5 aa, Homo sapiens
FCKFT

SEQ ID NO: 781 - protein, 5 aa, Homo sapiens
YPSYQ

SEQ ID NO: 782 - protein, 5 aa, Homo sapiens
MLVLK

SEQ ID NO: 783 - protein, 5 aa, Homo sapiens
SESKL

SEQ ID NO: 784 - protein, 5 aa, Homo sapiens
SLQAV

SEQ ID NO: 785 - protein, 5 aa, Homo sapiens
KGESH

SEQ ID NO: 786 - protein, 5 aa, Homo sapiens
LRKGT

SEQ ID NO: 787 - protein, 5 aa, Homo sapiens
KDKDD

SEQ ID NO: 788 - protein, 5 aa, Homo sapiens
HSNTT

SEQ ID NO: 789 - protein, 5 aa, Homo sapiens
HIGHK

SEQ ID NO: 790 - protein, 5 aa, Homo sapiens
DYDNL

SEQ ID NO: 791 - protein, 5 aa, Homo sapiens
RAVEA

SEQ ID NO: 792 - protein, 5 aa, Homo sapiens
YIHVF

SEQ ID NO: 793 - protein, 5 aa, Homo sapiens
GVVKA

SEQ ID NO: 794 - protein, 5 aa, Homo sapiens
RMVEG

SEQ ID NO: 795 - protein, 5 aa, Homo sapiens
KRLSR

SEQ ID NO: 796 - protein, 5 aa, Homo sapiens
LDLRK

SEQ ID NO: 797 - protein, 5 aa, Homo sapiens
ARKND

SEQ ID NO: 798 - protein, 5 aa, Homo sapiens
YIVVD

SEQ ID NO: 799 - protein, 5 aa, Homo sapiens
DWSSS

SEQ ID NO: 800 - protein, 5 aa, Homo sapiens
VRNKP

SEQ ID NO: 801 - protein, 5 aa, Homo sapiens
LNIET

SEQ ID NO: 802 - protein, 5 aa, Homo sapiens
EKGHC

SEQ ID NO: 803 - protein, 5 aa, Homo sapiens
RREQK

SEQ ID NO: 804 - protein, 5 aa, Homo sapiens
GDGQP

SEQ ID NO: 805 - protein, 5 aa, Homo sapiens
DVHKK

SEQ ID NO: 806 - protein, 5 aa, Homo sapiens
GISTF

SEQ ID NO: 807 - protein, 5 aa, Homo sapiens
KTKLT

SEQ ID NO: 808 - protein, 5 aa, Homo sapiens
QGAST

SEQ ID NO: 809 - protein, 5 aa, Homo sapiens
QSCNS

SEQ ID NO: 810 - protein, 5 aa, Homo sapiens
LRAAR

SEQ ID NO: 811 - protein, 5 aa, Homo sapiens
KISSL

SEQ ID NO: 812 - protein, 5 aa, Homo sapiens
TKQQD

SEQ ID NO: 813 - protein, 5 aa, Homo sapiens
RLLPP

SEQ ID NO: 814 - protein, 5 aa, Homo sapiens
SCKIS

SEQ ID NO: 815 - protein, 5 aa, Homo sapiens
DEMAV

SEQ ID NO: 816 - protein, 5 aa, Homo sapiens
IQMGI

SEQ ID NO: 817 - protein, 5 aa, Homo sapiens
SSMQR

SEQ ID NO: 818 - protein, 5 aa, Homo sapiens
FMDVN

SEQ ID NO: 819 - protein, 5 aa, Homo sapiens
DDDDI

SEQ ID NO: 820 - protein, 5 aa, Homo sapiens
RSQIA

SEQ ID NO: 821 - protein, 5 aa, Homo sapiens
VEGRK

SEQ ID NO: 822 - protein, 5 aa, Homo sapiens
LSYVL

SEQ ID NO: 823 - protein, 5 aa, Homo sapiens
GFSYK

SEQ ID NO: 824 - protein, 5 aa, Homo sapiens
CNNQY

SEQ ID NO: 825 - protein, 5 aa, Homo sapiens
LKDLL

SEQ ID NO: 826 - protein, 5 aa, Homo sapiens
KNMYY

SEQ ID NO: 827 - protein, 5 aa, Homo sapiens
YFFLL

SEQ ID NO: 828 - protein, 5 aa, Homo sapiens
VKTMG

SEQ ID NO: 829 - protein, 5 aa, Homo sapiens
RRARP

SEQ ID NO: 830 - protein, 5 aa, Homo sapiens
NHICL

SEQ ID NO: 831 - protein, 5 aa, Homo sapiens
LQKPQ

SEQ ID NO: 832 - protein, 5 aa, Homo sapiens
KARAQ

SEQ ID NO: 833 - protein, 5 aa, Homo sapiens
AAQGL

SEQ ID NO: 834 - protein, 5 aa, Homo sapiens
RTHTG

SEQ ID NO: 835 - protein, 5 aa, Homo sapiens
DWLGC

SEQ ID NO: 836 - protein, 5 aa, Homo sapiens
SSNED

SEQ ID NO: 837 - protein, 5 aa, Homo sapiens
PPAPT

SEQ ID NO: 838 - protein, 5 aa, Homo sapiens
KATAE

SEQ ID NO: 839 - protein, 5 aa, Homo sapiens
TVQAK

SEQ ID NO: 840 - protein, 5 aa, Homo sapiens
CSCCP

SEQ ID NO: 841 - protein, 5 aa, Homo sapiens
HDEVS

SEQ ID NO: 842 - protein, 5 aa, Homo sapiens
LHNFG

SEQ ID NO: 843 - protein, 5 aa, Homo sapiens
VFPAQ

SEQ ID NO: 844 - protein, 5 aa, Homo sapiens
LVFPL

SEQ ID NO: 845 - protein, 5 aa, Homo sapiens
NNLRH

SEQ ID NO: 846 - protein, 5 aa, Homo sapiens
AGGYA

SEQ ID NO: 847 - protein, 5 aa, Homo sapiens
NKLSQ

SEQ ID NO: 848 - protein, 5 aa, Homo sapiens
ADHRR

SEQ ID NO: 849 - protein, 5 aa, Homo sapiens
SLERS

SEQ ID NO: 850 - protein, 5 aa, Homo sapiens
VLTIN

SEQ ID NO: 851 - protein, 5 aa, Homo sapiens
SGFSL

SEQ ID NO: 852 - protein, 5 aa, Homo sapiens
LQEWV

SEQ ID NO: 853 - protein, 5 aa, Homo sapiens
SMPLK

SEQ ID NO: 854 - protein, 5 aa, Homo sapiens
YLAGK

SEQ ID NO: 855 - protein, 5 aa, Homo sapiens
FCSSI

SEQ ID NO: 856 - protein, 5 aa, Homo sapiens
HWLYE

SEQ ID NO: 857 - protein, 5 aa, Homo sapiens
KKEKK

SEQ ID NO: 858 - protein, 5 aa, Homo sapiens
LELTS

SEQ ID NO: 859 - protein, 5 aa, Homo sapiens
VDLLA

SEQ ID NO: 860 - protein, 5 aa, Homo sapiens
GEEEA

SEQ ID NO: 861 - protein, 5 aa, Homo sapiens
ERKTD

SEQ ID NO: 862 - protein, 5 aa, Homo sapiens
VLLGP

SEQ ID NO: 863 - protein, 5 aa, Homo sapiens
HLKTQ

SEQ ID NO: 864 - protein, 5 aa, Homo sapiens
EESEK

SEQ ID NO: 865 - protein, 5 aa, Homo sapiens
SKEEL

SEQ ID NO: 866 - protein, 5 aa, Homo sapiens
QDTQA

SEQ ID NO: 867 - protein, 5 aa, Homo sapiens
LSCTA

SEQ ID NO: 868 - protein, 5 aa, Homo sapiens
QKHFQ

SEQ ID NO: 869 - protein, 5 aa, Homo sapiens
RVDLL

SEQ ID NO: 870 - protein, 5 aa, Homo sapiens
FTEFV

SEQ ID NO: 871 - protein, 5 aa, Homo sapiens
PGAKA

SEQ ID NO: 872 - protein, 5 aa, Homo sapiens
FSAKL

SEQ ID NO: 873 - protein, 5 aa, Homo sapiens
ISQAS

SEQ ID NO: 874 - protein, 5 aa, Homo sapiens
EVALH

SEQ ID NO: 875 - protein, 5 aa, Homo sapiens
WVEDY

SEQ ID NO: 876 - protein, 5 aa, Homo sapiens
IPPPP

SEQ ID NO: 877 - protein, 5 aa, Homo sapiens
TVSNH

SEQ ID NO: 878 - protein, 5 aa, Homo sapiens
GQGPD

SEQ ID NO: 879 - protein, 5 aa, Homo sapiens
WSSGK

SEQ ID NO: 880 - protein, 5 aa, Homo sapiens
GPRPL

SEQ ID NO: 881 - protein, 5 aa, Homo sapiens
VPEKD

SEQ ID NO: 882 - protein, 5 aa, Homo sapiens
KWQYF

SEQ ID NO: 883 - protein, 5 aa, Homo sapiens
ILKAR

SEQ ID NO: 884 - protein, 5 aa, Homo sapiens
SQKPQ

SEQ ID NO: 885 - protein, 5 aa, Homo sapiens
AWYYM

SEQ ID NO: 886 - protein, 5 aa, Homo sapiens
QVSIF

SEQ ID NO: 887 - protein, 5 aa, Homo sapiens
FWRIM

SEQ ID NO: 888 - protein, 5 aa, Homo sapiens
PQPTC

SEQ ID NO: 889 - protein, 5 aa, Homo sapiens
RAKKK

SEQ ID NO: 890 - protein, 5 aa, Homo sapiens
ESFRI

SEQ ID NO: 891 - protein, 5 aa, Homo sapiens
KLSKK

SEQ ID NO: 892 - protein, 5 aa, Homo sapiens
CQISC

SEQ ID NO: 893 - protein, 5 aa, Homo sapiens
VKLED

SEQ ID NO: 894 - protein, 5 aa, Homo sapiens
TPLYI

SEQ ID NO: 895 - protein, 5 aa, Homo sapiens
LTFYS

SEQ ID NO: 896 - protein, 5 aa, Homo sapiens
LSVIM

SEQ ID NO: 897 - protein, 5 aa, Homo sapiens
HELHL

SEQ ID NO: 898 - protein, 5 aa, Homo sapiens
QQCIE

SEQ ID NO: 899 - protein, 5 aa, Homo sapiens
GFKIF

SEQ ID NO: 900 - protein, 5 aa, Homo sapiens
PIPLV

SEQ ID NO: 901 - protein, 5 aa, Homo sapiens
AGKHG

SEQ ID NO: 902 - protein, 5 aa, Homo sapiens
KKKKL

SEQ ID NO: 903 - protein, 5 aa, Homo sapiens
LPKAD

SEQ ID NO: 904 - protein, 5 aa, Homo sapiens
VDFAL

SEQ ID NO: 905 - protein, 5 aa, Homo sapiens
IYSSL

SEQ ID NO: 906 - protein, 5 aa, Homo sapiens
EGPPT

SEQ ID NO: 907 - protein, 5 aa, Homo sapiens
FFCFV

SEQ ID NO: 908 - protein, 5 aa, Homo sapiens
QLSWL

SEQ ID NO: 909 - protein, 5 aa, Homo sapiens
SKPEN

SEQ ID NO: 910 - protein, 5 aa, Homo sapiens
PAKRM

SEQ ID NO: 911 - protein, 5 aa, Homo sapiens
CFKFI

SEQ ID NO: 912 - protein, 5 aa, Homo sapiens
QTGEH

SEQ ID NO: 913 - protein, 5 aa, Homo sapiens
TMYFA

SEQ ID NO: 914 - protein, 5 aa, Homo sapiens
DITRL

SEQ ID NO: 915 - protein, 5 aa, Homo sapiens
KTYSK

SEQ ID NO: 916 - protein, 5 aa, Homo sapiens
VPNPP

SEQ ID NO: 917 - protein, 5 aa, Homo sapiens
ESYLE

SEQ ID NO: 918 - protein, 5 aa, Homo sapiens
EQEDL

SEQ ID NO: 919 - protein, 5 aa, Homo sapiens
QNKSM

SEQ ID NO: 920 - protein, 5 aa, Homo sapiens
KTKGS

SEQ ID NO: 921 - protein, 5 aa, Homo sapiens
QSVFK

SEQ ID NO: 922 - protein, 5 aa, Homo sapiens
DNMRP

SEQ ID NO: 923 - protein, 5 aa, Homo sapiens
KIEKL

SEQ ID NO: 924 - protein, 5 aa, Homo sapiens
RPNYF

SEQ ID NO: 925 - protein, 5 aa, Homo sapiens
DSGFY

SEQ ID NO: 926 - protein, 5 aa, Homo sapiens
QITQS

SEQ ID NO: 927 - protein, 5 aa, Homo sapiens
VELSG

SEQ ID NO: 928 - protein, 5 aa, Homo sapiens
DEADS

SEQ ID NO: 929 - protein, 5 aa, Homo sapiens
SNILP

SEQ ID NO: 930 - protein, 5 aa, Homo sapiens
NFGFV

SEQ ID NO: 931 - protein, 5 aa, Homo sapiens
MQESP

SEQ ID NO: 932 - protein, 5 aa, Homo sapiens
TPVKN

SEQ ID NO: 933 - protein, 5 aa, Homo sapiens
LVTLR

SEQ ID NO: 934 - protein, 5 aa, Homo sapiens
AVSLE

SEQ ID NO: 935 - protein, 5 aa, Homo sapiens
PDYFL

SEQ ID NO: 936 - protein, 5 aa, Homo sapiens
VTQSD

SEQ ID NO: 937 - protein, 5 aa, Homo sapiens
DLDFE

SEQ ID NO: 938 - protein, 5 aa, Homo sapiens
AKKKD

SEQ ID NO: 939 - protein, 5 aa, Homo sapiens
SQSVR

SEQ ID NO: 940 - protein, 5 aa, Homo sapiens
IPNVI

SEQ ID NO: 941 - protein, 5 aa, Homo sapiens
DRDLQ

SEQ ID NO: 942 - protein, 5 aa, Homo sapiens
RYSKS

SEQ ID NO: 943 - protein, 5 aa, Homo sapiens
SATDA

SEQ ID NO: 944 - protein, 5 aa, Homo sapiens
DSDSD

SEQ ID NO: 945 - protein, 5 aa, Homo sapiens
CKAKV

SEQ ID NO: 946 - protein, 5 aa, Homo sapiens
KPFEV

SEQ ID NO: 947 - protein, 5 aa, Homo sapiens
DIALP

SEQ ID NO: 948 - protein, 5 aa, Homo sapiens
NGNKP

SEQ ID NO: 949 - protein, 5 aa, Homo sapiens
LYECN

SEQ ID NO: 950 - protein, 5 aa, Homo sapiens
SPCYG

SEQ ID NO: 951 - protein, 5 aa, Homo sapiens
KFILG

SEQ ID NO: 952 - protein, 5 aa, Homo sapiens
KEVDG

SEQ ID NO: 953 - protein, 5 aa, Homo sapiens
LSSFN

SEQ ID NO: 954 - protein, 5 aa, Homo sapiens
PQDKR

SEQ ID NO: 955 - protein, 5 aa, Homo sapiens
GITGL

SEQ ID NO: 956 - protein, 5 aa, Homo sapiens
TMDTS

SEQ ID NO: 957 - protein, 5 aa, Homo sapiens
TFSKL

SEQ ID NO: 958 - protein, 5 aa, Homo sapiens
AQHAS

SEQ ID NO: 959 - protein, 5 aa, Homo sapiens
GLLFL

SEQ ID NO: 960 - protein, 5 aa, Homo sapiens
QPAVS

SEQ ID NO: 961 - protein, 5 aa, Homo sapiens
LVTEV

SEQ ID NO: 962 - protein, 5 aa, Homo sapiens
EAAPE

SEQ ID NO: 963 - protein, 5 aa, Homo sapiens
GPEAT

SEQ ID NO: 964 - protein, 5 aa, Homo sapiens
LESRG

SEQ ID NO: 965 - protein, 5 aa, Homo sapiens
PPPSD

SEQ ID NO: 966 - protein, 5 aa, Homo sapiens
GQETL

SEQ ID NO: 967 - protein, 5 aa, Homo sapiens
IPATA

SEQ ID NO: 968 - protein, 5 aa, Homo sapiens
IPAQK

SEQ ID NO: 969 - protein, 5 aa, Homo sapiens
EATTP

SEQ ID NO: 970 - protein, 5 aa, Homo sapiens
GVKPR

SEQ ID NO: 971 - protein, 5 aa, Homo sapiens
PVRDY

SEQ ID NO: 972 - protein, 5 aa, Homo sapiens
SATSL

SEQ ID NO: 973 - protein, 5 aa, Homo sapiens
PPPTN

SEQ ID NO: 974 - protein, 5 aa, Homo sapiens
ECGCR

SEQ ID NO: 975 - protein, 5 aa, Homo sapiens
PSRQL

SEQ ID NO: 976 - protein, 5 aa, Homo sapiens
CRVQP

SEQ ID NO: 977 - protein, 5 aa, Homo sapiens
EETDD

SEQ ID NO: 978 - protein, 5 aa, Homo sapiens
EGADS

SEQ ID NO: 979 - protein, 5 aa, Homo sapiens
DSESE

SEQ ID NO: 980 - protein, 5 aa, Homo sapiens
GEKSD

SEQ ID NO: 981 - protein, 5 aa, Homo sapiens
DDQQE

SEQ ID NO: 982 - protein, 5 aa, Homo sapiens
SYMPS

SEQ ID NO: 983 - protein, 5 aa, Homo sapiens
ATPAR

SEQ ID NO: 984 - protein, 5 aa, Homo sapiens
SKTPS

SEQ ID NO: 985 - protein, 5 aa, Homo sapiens
VNKEL

SEQ ID NO: 986 - protein, 5 aa, Homo sapiens
QDLLD

SEQ ID NO: 987 - protein, 5 aa, Homo sapiens
TGEMQ

SEQ ID NO: 988 - protein, 5 aa, Homo sapiens
RLYLQ

SEQ ID NO: 989 - protein, 5 aa, Homo sapiens
NESAM

SEQ ID NO: 990 - protein, 5 aa, Homo sapiens
GTIDL

SEQ ID NO: 991 - protein, 5 aa, Homo sapiens
EDDDY

SEQ ID NO: 992 - protein, 5 aa, Homo sapiens
VCVCN

SEQ ID NO: 993 - protein, 5 aa, Homo sapiens
PKVKN

SEQ ID NO: 994 - protein, 5 aa, Homo sapiens
SYLKR

SEQ ID NO: 995 - protein, 5 aa, Homo sapiens
FQGRE

SEQ ID NO: 996 - protein, 5 aa, Homo sapiens
MSLGK

SEQ ID NO: 997 - protein, 5 aa, Homo sapiens
VTQTP

SEQ ID NO: 998 - protein, 5 aa, Homo sapiens
GLDEI

SEQ ID NO: 999 - protein, 5 aa, Homo sapiens
NTSLT

SEQ ID NO: 1000 - protein, 5 aa, Homo sapiens
HRWTE

SEQ ID NO: 1001 - protein, 5 aa, Homo sapiens
LEERP

SEQ ID NO: 1002 - protein, 5 aa, Homo sapiens
DRMFF

SEQ ID NO: 1003 - protein, 5 aa, Homo sapiens
PFESV

SEQ ID NO: 1004 - protein, 5 aa, Homo sapiens
SCKCS

SEQ ID NO: 1005 - protein, 5 aa, Homo sapiens
SPVPA

SEQ ID NO: 1006 - protein, 5 aa, Homo sapiens
ADVVS

SEQ ID NO: 1007 - protein, 5 aa, Homo sapiens
PEEKK

SEQ ID NO: 1008 - protein, 5 aa, Homo sapiens
QLEKP

SEQ ID NO: 1009 - protein, 5 aa, Homo sapiens
LSTPR

SEQ ID NO: 1010 - protein, 5 aa, Homo sapiens
ANKKH

SEQ ID NO: 1011 - protein, 5 aa, Homo sapiens
GYETL

SEQ ID NO: 1012 - protein, 5 aa, Homo sapiens
QLTSA

SEQ ID NO: 1013 - protein, 5 aa, Homo sapiens
GVALI

SEQ ID NO: 1014 - protein, 5 aa, Homo sapiens
KFQIL

SEQ ID NO: 1015 - protein, 5 aa, Homo sapiens
LFPWE

SEQ ID NO: 1016 - protein, 5 aa, Homo sapiens
KDVSV

SEQ ID NO: 1017 - protein, 5 aa, Homo sapiens
QMEPV

SEQ ID NO: 1018 - protein, 5 aa, Homo sapiens
LKIRE

SEQ ID NO: 1019 - protein, 5 aa, Homo sapiens
EAPGQ

SEQ ID NO: 1020 - protein, 5 aa, Homo sapiens
IKTSK

SEQ ID NO: 1021 - protein, 5 aa, Homo sapiens
YRVQV

SEQ ID NO: 1022 - protein, 5 aa, Homo sapiens
SSCSC

SEQ ID NO: 1023 - protein, 5 aa, Homo sapiens
QHGAL

SEQ ID NO: 1024 - protein, 5 aa, Homo sapiens
EIRSL

SEQ ID NO: 1025 - protein, 5 aa, Homo sapiens
YVACS

SEQ ID NO: 1026 - protein, 5 aa, Homo sapiens
VATSP

SEQ ID NO: 1027 - protein, 5 aa, Homo sapiens
PSYAS

SEQ ID NO: 1028 - protein, 5 aa, Homo sapiens
MTPPW

SEQ ID NO: 1029 - protein, 5 aa, Homo sapiens
STSPC

SEQ ID NO: 1030 - protein, 5 aa, Homo sapiens
FTASK

SEQ ID NO: 1031 - protein, 5 aa, Homo sapiens
RAYKI

SEQ ID NO: 1032 - protein, 5 aa, Homo sapiens
PHLTH

SEQ ID NO: 1033 - protein, 5 aa, Homo sapiens
PNKTC

SEQ ID NO: 1034 - protein, 5 aa, Homo sapiens
PNTFF

SEQ ID NO: 1035 - protein, 5 aa, Homo sapiens
QETNL

SEQ ID NO: 1036 - protein, 5 aa, Homo sapiens
PSDCG

SEQ ID NO: 1037 - protein, 5 aa, Homo sapiens
RCMTC

SEQ ID NO: 1038 - protein, 5 aa, Homo sapiens
PPAAR

SEQ ID NO: 1039 - protein, 5 aa, Homo sapiens
QDCAC

SEQ ID NO: 1040 - protein, 5 aa, Homo sapiens
PLGTP

SEQ ID NO: 1041 - protein, 5 aa, Homo sapiens
RRFLN

SEQ ID NO: 1042 - protein, 5 aa, Homo sapiens
QLRQA

SEQ ID NO: 1043 - protein, 5 aa, Homo sapiens
VNVHS

SEQ ID NO: 1044 - protein, 5 aa, Homo sapiens
FSRDK

SEQ ID NO: 1045 - protein, 5 aa, Homo sapiens
FFLFF

SEQ ID NO: 1046 - protein, 5 aa, Homo sapiens
MCCKT

SEQ ID NO: 1047 - protein, 5 aa, Homo sapiens
EGTRQ

SEQ ID NO: 1048 - protein, 5 aa, Homo sapiens
EMTGE

SEQ ID NO: 1049 - protein, 5 aa, Homo sapiens
IAARN

SEQ ID NO: 1050 - protein, 5 aa, Homo sapiens
EHRDS

SEQ ID NO: 1051 - protein, 5 aa, Homo sapiens
LTNSS

SEQ ID NO: 1052 - protein, 5 aa, Homo sapiens
VQISG

SEQ ID NO: 1053 - protein, 5 aa, Homo sapiens
EKKEL

SEQ ID NO: 1054 - protein, 5 aa, Homo sapiens
EEFFI

SEQ ID NO: 1055 - protein, 5 aa, Homo sapiens
SRLLA

SEQ ID NO: 1056 - protein, 5 aa, Homo sapiens
LYCEL

SEQ ID NO: 1057 - protein, 5 aa, Homo sapiens
ITSGP

SEQ ID NO: 1058 - protein, 5 aa, Homo sapiens
SLPRP

SEQ ID NO: 1059 - protein, 5 aa, Homo sapiens
KVPQS

SEQ ID NO: 1060 - protein, 5 aa, Homo sapiens
PGSSR

SEQ ID NO: 1061 - protein, 5 aa, Homo sapiens
QKYAM

SEQ ID NO: 1062 - protein, 5 aa, Homo sapiens
VHTCK

SEQ ID NO: 1063 - protein, 5 aa, Homo sapiens
RDHPY

SEQ ID NO: 1064 - protein, 5 aa, Homo sapiens
RDNLY

SEQ ID NO: 1065 - protein, 5 aa, Homo sapiens
KMDII

SEQ ID NO: 1066 - protein, 5 aa, Homo sapiens
RKKQF

SEQ ID NO: 1067 - protein, 5 aa, Homo sapiens
EAAHH

SEQ ID NO: 1068 - protein, 5 aa, Homo sapiens
KSNFL

SEQ ID NO: 1069 - protein, 5 aa, Homo sapiens
LYCEL

SEQ ID NO: 1070 - protein, 5 aa, Homo sapiens
FRCNF

SEQ ID NO: 1071 - protein, 5 aa, Homo sapiens
GSQQH

SEQ ID NO: 1072 - protein, 5 aa, Homo sapiens
NMEEF

SEQ ID NO: 1073 - protein, 5 aa, Homo sapiens
RPYYQ

SEQ ID NO: 1074 - protein, 5 aa, Homo sapiens
SGTLY

SEQ ID NO: 1075 - protein, 5 aa, Homo sapiens
SFLQL

SEQ ID NO: 1076 - protein, 5 aa, Homo sapiens
ISWVY

SEQ ID NO: 1077 - protein, 5 aa, Homo sapiens
FKNFS

SEQ ID NO: 1078 - protein, 5 aa, Homo sapiens
LKQEK

SEQ ID NO: 1079 - protein, 5 aa, Homo sapiens
QLSQD

SEQ ID NO: 1080 - protein, 5 aa, Homo sapiens
QHLNY

SEQ ID NO: 1081 - protein, 5 aa, Homo sapiens
RTAIF

SEQ ID NO: 1082 - protein, 5 aa, Homo sapiens
GAFRP

SEQ ID NO: 1083 - protein, 5 aa, Homo sapiens
AKAGE

SEQ ID NO: 1084 - protein, 5 aa, Homo sapiens
EMEEL

SEQ ID NO: 1085 - protein, 5 aa, Homo sapiens
LKTTS

SEQ ID NO: 1086 - protein, 5 aa, Homo sapiens
VPLTR

SEQ ID NO: 1087 - protein, 5 aa, Homo sapiens
EDVLF

SEQ ID NO: 1088 - protein, 5 aa, Homo sapiens
RGFLV

SEQ ID NO: 1089 - protein, 5 aa, Homo sapiens
KHDEL

SEQ ID NO: 1090 - protein, 5 aa, Homo sapiens
GGIFA

SEQ ID NO: 1091 - protein, 5 aa, Homo sapiens
RIICF

SEQ ID NO: 1092 - protein, 5 aa, Homo sapiens
NQTTC

SEQ ID NO: 1093 - protein, 5 aa, Homo sapiens
SGRRF

SEQ ID NO: 1094 - protein, 5 aa, Homo sapiens
LSLNK

SEQ ID NO: 1095 - protein, 5 aa, Homo sapiens
RGCSG

SEQ ID NO: 1096 - protein, 5 aa, Homo sapiens
TLSGE

SEQ ID NO: 1097 - protein, 5 aa, Homo sapiens
GLCPH

SEQ ID NO: 1098 - protein, 5 aa, Homo sapiens
DEWED

SEQ ID NO: 1099 - protein, 5 aa, Homo sapiens
RSIQL

SEQ ID NO: 1100 - protein, 5 aa, Homo sapiens
LKLLK

SEQ ID NO: 1101 - protein, 5 aa, Homo sapiens
IDNNF

SEQ ID NO: 1102 - protein, 5 aa, Homo sapiens
VFLRT

SEQ ID NO: 1103 - protein, 5 aa, Homo sapiens
AASQD

SEQ ID NO: 1104 - protein, 5 aa, Homo sapiens
KWFDS

SEQ ID NO: 1105 - protein, 5 aa, Homo sapiens
AEQQA

SEQ ID NO: 1106 - protein, 5 aa, Homo sapiens
EGPEV

SEQ ID NO: 1107 - protein, 5 aa, Homo sapiens
QVMEP

SEQ ID NO: 1108 - protein, 5 aa, Homo sapiens
CLTFI

SEQ ID NO: 1109 - protein, 5 aa, Homo sapiens
KLGNP

SEQ ID NO: 1110 - protein, 5 aa, Homo sapiens
SFVDP

SEQ ID NO: 1111 - protein, 5 aa, Homo sapiens
IVQHD

SEQ ID NO: 1112 - protein, 5 aa, Homo sapiens
SKSKS

SEQ ID NO: 1113 - protein, 5 aa, Homo sapiens
SWGTR

SEQ ID NO: 1114 - protein, 5 aa, Homo sapiens
NYVII

SEQ ID NO: 1115 - protein, 5 aa, Homo sapiens
GEEKD

SEQ ID NO: 1116 - protein, 5 aa, Homo sapiens
GKPWK

SEQ ID NO: 1117 - protein, 5 aa, Homo sapiens
APGMS

SEQ ID NO: 1118 - protein, 5 aa, Homo sapiens
NPKRV

SEQ ID NO: 1119 - protein, 5 aa, Homo sapiens
FINSF

SEQ ID NO: 1120 - protein, 5 aa, Homo sapiens
ALPRS

SEQ ID NO: 1121 - protein, 5 aa, Homo sapiens
HLKQL

SEQ ID NO: 1122 - protein, 5 aa, Homo sapiens
LKTEL

SEQ ID NO: 1123 - protein, 5 aa, Homo sapiens
KTPRL

SEQ ID NO: 1124 - protein, 5 aa, Homo sapiens
LAAIA

SEQ ID NO: 1125 - protein, 5 aa, Homo sapiens
WFTQN

SEQ ID NO: 1126 - protein, 5 aa, Homo sapiens
EVKKE

SEQ ID NO: 1127 - protein, 5 aa, Homo sapiens
NFGDF

SEQ ID NO: 1128 - protein, 5 aa, Homo sapiens
LGLGP

SEQ ID NO: 1129 - protein, 5 aa, Homo sapiens
DEKEE

SEQ ID NO: 1130 - protein, 5 aa, Homo sapiens
CMLGQ

SEQ ID NO: 1131 - protein, 5 aa, Homo sapiens
TASES

SEQ ID NO: 1132 - protein, 5 aa, Homo sapiens
CCAIM

SEQ ID NO: 1133 - protein, 5 aa, Homo sapiens
QEDKH

SEQ ID NO: 1134 - protein, 5 aa, Homo sapiens
EGNPY

SEQ ID NO: 1135 - protein, 5 aa, Homo sapiens
QIPAS

SEQ ID NO: 1136 - protein, 5 aa, Homo sapiens
VIQLY

SEQ ID NO: 1137 - protein, 5 aa, Homo sapiens
PSSCA

SEQ ID NO: 1138 - protein, 5 aa, Homo sapiens
KYTRS

SEQ ID NO: 1139 - protein, 5 aa, Homo sapiens
FLNGC

SEQ ID NO: 1140 - protein, 5 aa, Homo sapiens
YSNSD

SEQ ID NO: 1141 - protein, 5 aa, Homo sapiens
LDALK

SEQ ID NO: 1142 - protein, 5 aa, Homo sapiens
LAKYC

SEQ ID NO: 1143 - protein, 5 aa, Homo sapiens
FFIDK

SEQ ID NO: 1144 - protein, 5 aa, Homo sapiens
DRYSG

SEQ ID NO: 1145 - protein, 5 aa, Homo sapiens
GPRAK

SEQ ID NO: 1146 - protein, 5 aa, Homo sapiens
FALAE

SEQ ID NO: 1147 - protein, 5 aa, Homo sapiens
KRKLL

SEQ ID NO: 1148 - protein, 5 aa, Homo sapiens
CMTEQ

SEQ ID NO: 1149 - protein, 5 aa, Homo sapiens
DEVRR

SEQ ID NO: 1150 - protein, 5 aa, Homo sapiens
HDDLE

SEQ ID NO: 1151 - protein, 5 aa, Homo sapiens
AVKVS

SEQ ID NO: 1152 - protein, 5 aa, Homo sapiens
FHGEI

SEQ ID NO: 1153 - protein, 5 aa, Homo sapiens
LQDHL

SEQ ID NO: 1154 - protein, 5 aa, Homo sapiens
TCACR

SEQ ID NO: 1155 - protein, 5 aa, Homo sapiens
LLFRN

SEQ ID NO: 1156 - protein, 5 aa, Homo sapiens
EITEL

SEQ ID NO: 1157 - protein, 5 aa, Homo sapiens
YRGPQ

SEQ ID NO: 1158 - protein, 5 aa, Homo sapiens
QDVKI

SEQ ID NO: 1159 - protein, 5 aa, Homo sapiens
HRKCF

SEQ ID NO: 1160 - protein, 5 aa, Homo sapiens
YNKGL

SEQ ID NO: 1161 - protein, 5 aa, Homo sapiens
YYTAF

SEQ ID NO: 1162 - protein, 5 aa, Homo sapiens
RNYEI

SEQ ID NO: 1163 - protein, 5 aa, Homo sapiens
CGQLS

SEQ ID NO: 1164 - protein, 5 aa, Homo sapiens
PALKS

SEQ ID NO: 1165 - protein, 5 aa, Homo sapiens
LELSA

SEQ ID NO: 1166 - protein, 5 aa, Homo sapiens
QLYQR

SEQ ID NO: 1167 - protein, 5 aa, Homo sapiens
RTARN

SEQ ID NO: 1168 - protein, 5 aa, Homo sapiens
HYSDF

SEQ ID NO: 1169 - protein, 5 aa, Homo sapiens
AWRGT

SEQ ID NO: 1170 - protein, 5 aa, Homo sapiens
RRIQQ

SEQ ID NO: 1171 - protein, 5 aa, Homo sapiens
DSPDQ

SEQ ID NO: 1172 - protein, 5 aa, Homo sapiens
YITKG

SEQ ID NO: 1173 - protein, 5 aa, Homo sapiens
EGHGD

SEQ ID NO: 1174 - protein, 5 aa, Homo sapiens
QNEES

SEQ ID NO: 1175 - protein, 5 aa, Homo sapiens
KARMD

SEQ ID NO: 1176 - protein, 5 aa, Homo sapiens
NFMKR

SEQ ID NO: 1177 - protein, 5 aa, Homo sapiens
EETKK

SEQ ID NO: 1178 - protein, 5 aa, Homo sapiens
SSEPN

SEQ ID NO: 1179 - protein, 5 aa, Homo sapiens
HLAQP

SEQ ID NO: 1180 - protein, 5 aa, Homo sapiens
TAIKT

SEQ ID NO: 1181 - protein, 5 aa, Homo sapiens
VHTCK

SEQ ID NO: 1182 - protein, 5 aa, Homo sapiens
NQKES

SEQ ID NO: 1183 - protein, 5 aa, Homo sapiens
QSMLS

SEQ ID NO: 1184 - protein, 5 aa, Homo sapiens
NMRTS

SEQ ID NO: 1185 - protein, 5 aa, Homo sapiens
ASMGR

SEQ ID NO: 1186 - protein, 5 aa, Homo sapiens
SAGSS

SEQ ID NO: 1187 - protein, 5 aa, Homo sapiens
ERLAP

SEQ ID NO: 1188 - protein, 5 aa, Homo sapiens
ASGMH

SEQ ID NO: 1189 - protein, 5 aa, Homo sapiens
LRMNL

SEQ ID NO: 1190 - protein, 5 aa, Homo sapiens
VGTAP

SEQ ID NO: 1191 - protein, 5 aa, Homo sapiens
TGKKP

SEQ ID NO: 1192 - protein, 5 aa, Homo sapiens
KDDKN

SEQ ID NO: 1193 - protein, 5 aa, Homo sapiens
SLSFL

SEQ ID NO: 1194 - protein, 5 aa, Homo sapiens
EKQAE

SEQ ID NO: 1195 - protein, 5 aa, Homo sapiens
RRSQY

SEQ ID NO: 1196 - protein, 5 aa, Homo sapiens
LFLSG

SEQ ID NO: 1197 - protein, 5 aa, Homo sapiens
RCVIS

SEQ ID NO: 1198 - protein, 5 aa, Homo sapiens
NHVNF

SEQ ID NO: 1199 - protein, 5 aa, Homo sapiens
FVKSQ

SEQ ID NO: 1200 - protein, 5 aa, Homo sapiens
YSSKH

SEQ ID NO: 1201 - protein, 5 aa, Homo sapiens
LYAFH

SEQ ID NO: 1202 - protein, 5 aa, Homo sapiens
KVKAM

SEQ ID NO: 1203 - protein, 5 aa, Homo sapiens
NTSGK

SEQ ID NO: 1204 - protein, 5 aa, Homo sapiens
QIVKK

SEQ ID NO: 1205 - protein, 5 aa, Homo sapiens
KSTKL

SEQ ID NO: 1206 - protein, 5 aa, Homo sapiens
QAFRP

SEQ ID NO: 1207 - protein, 5 aa, Homo sapiens
TPDAL

SEQ ID NO: 1208 - protein, 5 aa, Homo sapiens
PPPVY

SEQ ID NO: 1209 - protein, 5 aa, Homo sapiens
TGYSQ

SEQ ID NO: 1210 - protein, 5 aa, Homo sapiens
LDQSF

SEQ ID NO: 1211 - protein, 5 aa, Homo sapiens
EEIAC

SEQ ID NO: 1212 - protein, 5 aa, Homo sapiens
QTPKT

SEQ ID NO: 1213 - protein, 5 aa, Homo sapiens
PSKRK

SEQ ID NO: 1214 - protein, 5 aa, Homo sapiens
HTLKT

SEQ ID NO: 1215 - protein, 5 aa, Homo sapiens
YSPEN

SEQ ID NO: 1216 - protein, 5 aa, Homo sapiens
PLQAW

SEQ ID NO: 1217 - protein, 5 aa, Homo sapiens
PQGRY

SEQ ID NO: 1218 - protein, 5 aa, Homo sapiens
GLIDK

SEQ ID NO: 1219 - protein, 5 aa, Homo sapiens
VAGSW

SEQ ID NO: 1220 - protein, 5 aa, Homo sapiens
FRLLH

SEQ ID NO: 1221 - protein, 5 aa, Homo sapiens
PAAPQ

SEQ ID NO: 1222 - protein, 5 aa, Homo sapiens
VEPSC

SEQ ID NO: 1223 - protein, 5 aa, Homo sapiens
PVCFL

SEQ ID NO: 1224 - protein, 5 aa, Homo sapiens
TDSQQ

SEQ ID NO: 1225 - protein, 5 aa, Homo sapiens
SCNLM

SEQ ID NO: 1226 - protein, 5 aa, Homo sapiens
SPLDL

SEQ ID NO: 1227 - protein, 5 aa, Homo sapiens
VSWVY

SEQ ID NO: 1228 - protein, 5 aa, Homo sapiens
GKLKP

SEQ ID NO: 1229 - protein, 5 aa, Homo sapiens
AEPEH

SEQ ID NO: 1230 - protein, 5 aa, Homo sapiens
RHGPL

SEQ ID NO: 1231 - protein, 5 aa, Homo sapiens
IYYKV

SEQ ID NO: 1232 - protein, 5 aa, Homo sapiens
ANLTS

SEQ ID NO: 1233 - protein, 5 aa, Homo sapiens
FSLFV

SEQ ID NO: 1234 - protein, 5 aa, Homo sapiens
IFGPQ

SEQ ID NO: 1235 - protein, 5 aa, Homo sapiens
KMKNA

SEQ ID NO: 1236 - protein, 5 aa, Homo sapiens
IISEE

SEQ ID NO: 1237 - protein, 5 aa, Homo sapiens
HESEE

SEQ ID NO: 1238 - protein, 5 aa, Homo sapiens
APGHL

SEQ ID NO: 1239 - protein, 5 aa, Homo sapiens
STHRD

SEQ ID NO: 1240 - protein, 5 aa, Homo sapiens
KRKKK

SEQ ID NO: 1241 - protein, 5 aa, Homo sapiens
PVALA

SEQ ID NO: 1242 - protein, 5 aa, Homo sapiens
ANHAY

SEQ ID NO: 1243 - protein, 5 aa, Homo sapiens
WPSIN

SEQ ID NO: 1244 - protein, 5 aa, Homo sapiens
SKTGI

SEQ ID NO: 1245 - protein, 5 aa, Homo sapiens
CTSEI

SEQ ID NO: 1246 - protein, 5 aa, Homo sapiens
YYHHQ

SEQ ID NO: 1247 - protein, 5 aa, Homo sapiens
SQDNA

SEQ ID NO: 1248 - protein, 5 aa, Homo sapiens
GNKKN

SEQ ID NO: 1249 - protein, 5 aa, Homo sapiens
SILAS

SEQ ID NO: 1250 - protein, 5 aa, Homo sapiens
PKIGN

SEQ ID NO: 1251 - protein, 5 aa, Homo sapiens
AALGV

SEQ ID NO: 1252 - protein, 5 aa, Homo sapiens
KSSMF

SEQ ID NO: 1253 - protein, 5 aa, Homo sapiens
GYFSL

SEQ ID NO: 1254 - protein, 5 aa, Homo sapiens
PKYFL

SEQ ID NO: 1255 - protein, 5 aa, Homo sapiens
YQSRE

SEQ ID NO: 1256 - protein, 5 aa, Homo sapiens
FRTEI

SEQ ID NO: 1257 - protein, 5 aa, Homo sapiens
PTPAP

SEQ ID NO: 1258 - protein, 5 aa, Homo sapiens
VVEVS

SEQ ID NO: 1259 - protein, 5 aa, Homo sapiens
EHLES

SEQ ID NO: 1260 - protein, 5 aa, Homo sapiens
LEGKI

SEQ ID NO: 1261 - protein, 5 aa, Homo sapiens
LTDIY

SEQ ID NO: 1262 - protein, 5 aa, Homo sapiens
IDKPL

SEQ ID NO: 1263 - protein, 5 aa, Homo sapiens
ISTLT

SEQ ID NO: 1264 - protein, 5 aa, Homo sapiens
FLSAA

SEQ ID NO: 1265 - protein, 5 aa, Homo sapiens
DRYCK

SEQ ID NO: 1266 - protein, 5 aa, Homo sapiens
IKESL

SEQ ID NO: 1267 - protein, 5 aa, Homo sapiens
HLLPL

SEQ ID NO: 1268 - protein, 5 aa, Homo sapiens
KEENK

SEQ ID NO: 1269 - protein, 5 aa, Homo sapiens
KVPKY

SEQ ID NO: 1270 - protein, 5 aa, Homo sapiens
KELQF

SEQ ID NO: 1271 - protein, 5 aa, Homo sapiens
AAPKK

SEQ ID NO: 1272 - protein, 5 aa, Homo sapiens
EITVS

SEQ ID NO: 1273 - protein, 5 aa, Homo sapiens
PIPKL

SEQ ID NO: 1274 - protein, 5 aa, Homo sapiens
LAPQR

SEQ ID NO: 1275 - protein, 5 aa, Homo sapiens
PESIV

SEQ ID NO: 1276 - protein, 5 aa, Homo sapiens
VLHIV

SEQ ID NO: 1277 - protein, 5 aa, Homo sapiens
IEEVD

SEQ ID NO: 1278 - protein, 5 aa, Homo sapiens
AQEKD

SEQ ID NO: 1279 - protein, 5 aa, Homo sapiens
GPEEQ

SEQ ID NO: 1280 - protein, 5 aa, Homo sapiens
IKSII

SEQ ID NO: 1281 - protein, 5 aa, Homo sapiens
RDVDI

SEQ ID NO: 1282 - protein, 5 aa, Homo sapiens
PAAKI

SEQ ID NO: 1283 - protein, 5 aa, Homo sapiens
KFYSL

SEQ ID NO: 1284 - protein, 5 aa, Homo sapiens
SVEEE

SEQ ID NO: 1285 - protein, 5 aa, Homo sapiens
DQWMI

SEQ ID NO: 1286 - protein, 5 aa, Homo sapiens
LDSSC

SEQ ID NO: 1287 - protein, 5 aa, Homo sapiens
HLGDP

SEQ ID NO: 1288 - protein, 5 aa, Homo sapiens
APLES

SEQ ID NO: 1289 - protein, 5 aa, Homo sapiens
LQSSE

SEQ ID NO: 1290 - protein, 5 aa, Homo sapiens
RSLAS

SEQ ID NO: 1291 - protein, 5 aa, Homo sapiens
RTFLS

SEQ ID NO: 1292 - protein, 5 aa, Homo sapiens
PIRLA

SEQ ID NO: 1293 - protein, 5 aa, Homo sapiens
SRDRG

SEQ ID NO: 1294 - protein, 5 aa, Homo sapiens
LCDLF

SEQ ID NO: 1295 - protein, 5 aa, Homo sapiens
VLEVN

SEQ ID NO: 1296 - protein, 5 aa, Homo sapiens
KSSGS

SEQ ID NO: 1297 - protein, 5 aa, Homo sapiens
SALVA

SEQ ID NO: 1298 - protein, 5 aa, Homo sapiens
SVEGF

SEQ ID NO: 1299 - protein, 5 aa, Homo sapiens
TIAEN

SEQ ID NO: 1300 - protein, 5 aa, Homo sapiens
KLACE

SEQ ID NO: 1301 - protein, 5 aa, Homo sapiens
QSSAE

SEQ ID NO: 1302 - protein, 5 aa, Homo sapiens
KSASS

SEQ ID NO: 1303 - protein, 5 aa, Homo sapiens
EFQEV

SEQ ID NO: 1304 - protein, 5 aa, Homo sapiens
LFLRK

SEQ ID NO: 1305 - protein, 5 aa, Homo sapiens
ECGKA

SEQ ID NO: 1306 - protein, 5 aa, Homo sapiens
LGLTQ

SEQ ID NO: 1307 - protein, 5 aa, Homo sapiens
LESTL

SEQ ID NO: 1308 - protein, 5 aa, Homo sapiens
SKYNE

SEQ ID NO: 1309 - protein, 5 aa, Homo sapiens
NKPYK

SEQ ID NO: 1310 - protein, 5 aa, Homo sapiens
LSAHK

SEQ ID NO: 1311 - protein, 5 aa, Homo sapiens
RKRIH

SEQ ID NO: 1312 - protein, 5 aa, Homo sapiens
HSFLP

SEQ ID NO: 1313 - protein, 5 aa, Homo sapiens
EDFTC

SEQ ID NO: 1314 - protein, 5 aa, Homo sapiens
PPSHL

SEQ ID NO: 1315 - protein, 5 aa, Homo sapiens
AHLHQ

SEQ ID NO: 1316 - protein, 5 aa, Homo sapiens
CLCRL

SEQ ID NO: 1317 - protein, 5 aa, Homo sapiens
ALDGL

SEQ ID NO: 1318 - protein, 5 aa, Homo sapiens
LPLAV

SEQ ID NO: 1319 - protein, 5 aa, Homo sapiens
ATLSP

SEQ ID NO: 1320 - protein, 5 aa, Homo sapiens
PPSTP

SEQ ID NO: 1321 - protein, 5 aa, Homo sapiens
QFLDR

SEQ ID NO: 1322 - protein, 5 aa, Homo sapiens
EVVEK

SEQ ID NO: 1323 - protein, 5 aa, Homo sapiens
IYHVL

SEQ ID NO: 1324 - protein, 5 aa, Homo sapiens
LNSSA

SEQ ID NO: 1325 - protein, 5 aa, Homo sapiens
GNKLS

SEQ ID NO: 1326 - protein, 5 aa, Homo sapiens
DLKVD

SEQ ID NO: 1327 - protein, 5 aa, Homo sapiens
NSQKS

SEQ ID NO: 1328 - protein, 5 aa, Homo sapiens
LQDPT

SEQ ID NO: 1329 - protein, 5 aa, Homo sapiens
EQPLW

SEQ ID NO: 1330 - protein, 5 aa, Homo sapiens
LIDFH

SEQ ID NO: 1331 - protein, 5 aa, Homo sapiens
SGPGQ

SEQ ID NO: 1332 - protein, 5 aa, Homo sapiens
ECQDE

SEQ ID NO: 1333 - protein, 5 aa, Homo sapiens
FLPRI

SEQ ID NO: 1334 - protein, 5 aa, Homo sapiens
GEEKD

SEQ ID NO: 1335 - protein, 5 aa, Homo sapiens
NATST

SEQ ID NO: 1336 - protein, 5 aa, Homo sapiens
LMVNL

SEQ ID NO: 1337 - protein, 5 aa, Homo sapiens
LLTDV

SEQ ID NO: 1338 - protein, 5 aa, Homo sapiens
IIEVS

SEQ ID NO: 1339 - protein, 5 aa, Homo sapiens
NSNSW

SEQ ID NO: 1340 - protein, 5 aa, Homo sapiens
DAGGV

SEQ ID NO: 1341 - protein, 5 aa, Homo sapiens
FITHD

SEQ ID NO: 1342 - protein, 5 aa, Homo sapiens
VCALT

SEQ ID NO: 1343 - protein, 5 aa, Homo sapiens
VKAAS

SEQ ID NO: 1344 - protein, 5 aa, Homo sapiens
FQKVE

SEQ ID NO: 1345 - protein, 5 aa, Homo sapiens
SKSRV

SEQ ID NO: 1346 - protein, 5 aa, Homo sapiens
RRGTK

SEQ ID NO: 1347 - protein, 5 aa, Homo sapiens
KEWTE

SEQ ID NO: 1348 - protein, 5 aa, Homo sapiens
LKVSA

SEQ ID NO: 1349 - protein, 5 aa, Homo sapiens
IKLYL

SEQ ID NO: 1350 - protein, 5 aa, Homo sapiens
RRKSV

SEQ ID NO: 1351 - protein, 5 aa, Homo sapiens
IVSST

SEQ ID NO: 1352 - protein, 5 aa, Homo sapiens
GNEIS

SEQ ID NO: 1353 - protein, 5 aa, Homo sapiens
SPTCV

SEQ ID NO: 1354 - protein, 5 aa, Homo sapiens
IVAEA

SEQ ID NO: 1355 - protein, 5 aa, Homo sapiens
GTKKR

SEQ ID NO: 1356 - protein, 5 aa, Homo sapiens
LESSQ

SEQ ID NO: 1357 - protein, 5 aa, Homo sapiens
RRASQ

SEQ ID NO: 1358 - protein, 5 aa, Homo sapiens
YEIQL

SEQ ID NO: 1359 - protein, 5 aa, Homo sapiens
AQQAF

SEQ ID NO: 1360 - protein, 5 aa, Homo sapiens
DDEDD

SEQ ID NO: 1361 - protein, 5 aa, Homo sapiens
KKKKK

SEQ ID NO: 1362 - protein, 5 aa, Homo sapiens
HGKFR

SEQ ID NO: 1363 - protein, 5 aa, Homo sapiens
MASKE

SEQ ID NO: 1364 - protein, 5 aa, Homo sapiens
LGQFG

SEQ ID NO: 1365 - protein, 5 aa, Homo sapiens
WSKSN

SEQ ID NO: 1366 - protein, 5 aa, Homo sapiens
LKIWN

SEQ ID NO: 1367 - protein, 5 aa, Homo sapiens
PLVES

SEQ ID NO: 1368 - protein, 5 aa, Homo sapiens
QNNMD

SEQ ID NO: 1369 - protein, 5 aa, Homo sapiens
QRVAS

SEQ ID NO: 1370 - protein, 5 aa, Homo sapiens
INAKQ

SEQ ID NO: 1371 - protein, 5 aa, Homo sapiens
YLLYQ

SEQ ID NO: 1372 - protein, 5 aa, Homo sapiens
NPSVL

SEQ ID NO: 1373 - protein, 5 aa, Homo sapiens
SVAAS

SEQ ID NO: 1374 - protein, 5 aa, Homo sapiens
SVAWR

SEQ ID NO: 1375 - protein, 5 aa, Homo sapiens
QPEDV

SEQ ID NO: 1376 - protein, 5 aa, Homo sapiens
SNNMV

SEQ ID NO: 1377 - protein, 5 aa, Homo sapiens
DLKDL

SEQ ID NO: 1378 - protein, 5 aa, Homo sapiens
LYKPI

SEQ ID NO: 1379 - protein, 5 aa, Homo sapiens
NSCQK

SEQ ID NO: 1380 - protein, 5 aa, Homo sapiens
KAPLN

SEQ ID NO: 1381 - protein, 5 aa, Homo sapiens
MKIHL

SEQ ID NO: 1382 - protein, 5 aa, Homo sapiens
RTLGL

SEQ ID NO: 1383 - protein, 5 aa, Homo sapiens
KKRCC

SEQ ID NO: 1384 - protein, 5 aa, Homo sapiens
GYEDE

SEQ ID NO: 1385 - protein, 5 aa, Homo sapiens
PFPHS

SEQ ID NO: 1386 - protein, 5 aa, Homo sapiens
PFRPY

SEQ ID NO: 1387 - protein, 5 aa, Homo sapiens
SLRKS

SEQ ID NO: 1388 - protein, 5 aa, Homo sapiens
VYPDS

SEQ ID NO: 1389 - protein, 5 aa, Homo sapiens
TDSSN

SEQ ID NO: 1390 - protein, 5 aa, Homo sapiens
GPPRT

SEQ ID NO: 1391 - protein, 5 aa, Homo sapiens
EDDYD

SEQ ID NO: 1392 - protein, 5 aa, Homo sapiens
FNRPH

SEQ ID NO: 1393 - protein, 5 aa, Homo sapiens
TSKWD

SEQ ID NO: 1394 - protein, 5 aa, Homo sapiens
HMDCM

SEQ ID NO: 1395 - protein, 5 aa, Homo sapiens
WSVFS

SEQ ID NO: 1396 - protein, 5 aa, Homo sapiens
EKLRT

SEQ ID NO: 1397 - protein, 5 aa, Homo sapiens
LWLLH

SEQ ID NO: 1398 - protein, 5 aa, Homo sapiens
TRPHS

SEQ ID NO: 1399 - protein, 5 aa, Homo sapiens
ILAGR

SEQ ID NO: 1400 - protein, 5 aa, Homo sapiens
LQQKQ

SEQ ID NO: 1401 - protein, 5 aa, Homo sapiens
VYGTL

SEQ ID NO: 1402 - protein, 5 aa, Homo sapiens
NLRRL

SEQ ID NO: 1403 - protein, 5 aa, Homo sapiens
KHLGP

SEQ ID NO: 1404 - protein, 5 aa, Homo sapiens
KLACE

SEQ ID NO: 1405 - protein, 5 aa, Homo sapiens
EEMES

SEQ ID NO: 1406 - protein, 5 aa, Homo sapiens
MKAAK

SEQ ID NO: 1407 - protein, 5 aa, Homo sapiens
QQLAQ

SEQ ID NO: 1408 - protein, 5 aa, Homo sapiens
SSVPR

SEQ ID NO: 1409 - protein, 5 aa, Homo sapiens
IIFLI

SEQ ID NO: 1410 - protein, 5 aa, Homo sapiens
PLAGR

SEQ ID NO: 1411 - protein, 5 aa, Homo sapiens
AEIMA

SEQ ID NO: 1412 - protein, 5 aa, Homo sapiens
HRTVV

SEQ ID NO: 1413 - protein, 5 aa, Homo sapiens
KSFTQ

SEQ ID NO: 1414 - protein, 5 aa, Homo sapiens
DRDSL

SEQ ID NO: 1415 - protein, 5 aa, Homo sapiens
SLGSD

SEQ ID NO: 1416 - protein, 5 aa, Homo sapiens
KHLGN

SEQ ID NO: 1417 - protein, 5 aa, Homo sapiens
FKCKK

SEQ ID NO: 1418 - protein, 5 aa, Homo sapiens
VKIEV

SEQ ID NO: 1419 - protein, 5 aa, Homo sapiens
KIRHA

SEQ ID NO: 1420 - protein, 5 aa, Homo sapiens
PPPGD

SEQ ID NO: 1421 - protein, 5 aa, Homo sapiens
GQEQS

SEQ ID NO: 1422 - protein, 5 aa, Homo sapiens
RNRYL

SEQ ID NO: 1423 - protein, 5 aa, Homo sapiens
FFCKK

SEQ ID NO: 1424 - protein, 5 aa, Homo sapiens
AMFKL

SEQ ID NO: 1425 - protein, 5 aa, Homo sapiens
SKLTY

SEQ ID NO: 1426 - protein, 5 aa, Homo sapiens
GGLFM

SEQ ID NO: 1427 - protein, 5 aa, Homo sapiens
IQTKM

SEQ ID NO: 1428 - protein, 5 aa, Homo sapiens
GPMQH

SEQ ID NO: 1429 - protein, 5 aa, Homo sapiens
RGNRR

SEQ ID NO: 1430 - protein, 5 aa, Homo sapiens
LCFSS

SEQ ID NO: 1431 - protein, 5 aa, Homo sapiens
PITVE

SEQ ID NO: 1432 - protein, 5 aa, Homo sapiens
FRKTT

SEQ ID NO: 1433 - protein, 5 aa, Homo sapiens
KSAMF

SEQ ID NO: 1434 - protein, 5 aa, Homo sapiens
APEAG

SEQ ID NO: 1435 - protein, 5 aa, Homo sapiens
SQEAL

SEQ ID NO: 1436 - protein, 5 aa, Homo sapiens
VDSKP

SEQ ID NO: 1437 - protein, 5 aa, Homo sapiens
PDPTT

SEQ ID NO: 1438 - protein, 5 aa, Homo sapiens
TMMKT

SEQ ID NO: 1439 - protein, 5 aa, Homo sapiens
RGERA

SEQ ID NO: 1440 - protein, 5 aa, Homo sapiens
KRGKK

SEQ ID NO: 1441 - protein, 5 aa, Homo sapiens
SCPAA

SEQ ID NO: 1442 - protein, 5 aa, Homo sapiens
PLLQA

SEQ ID NO: 1443 - protein, 5 aa, Homo sapiens
TIMCS

SEQ ID NO: 1444 - protein, 5 aa, Homo sapiens
QRPRK

SEQ ID NO: 1445 - protein, 5 aa, Homo sapiens
ASLYL

SEQ ID NO: 1446 - protein, 5 aa, Homo sapiens
KVSAL

SEQ ID NO: 1447 - protein, 5 aa, Homo sapiens
SPIEA

SEQ ID NO: 1448 - protein, 5 aa, Homo sapiens
EESMM

SEQ ID NO: 1449 - protein, 5 aa, Homo sapiens
YSAVH

SEQ ID NO: 1450 - protein, 5 aa, Homo sapiens
RLSES

SEQ ID NO: 1451 - protein, 5 aa, Homo sapiens
INPNL

SEQ ID NO: 1452 - protein, 5 aa, Homo sapiens
VSLSR

SEQ ID NO: 1453 - protein, 5 aa, Homo sapiens
NKIMP

SEQ ID NO: 1454 - protein, 5 aa, Homo sapiens
FGKKY

SEQ ID NO: 1455 - protein, 5 aa, Homo sapiens
QLLEN

SEQ ID NO: 1456 - protein, 5 aa, Homo sapiens
MTNSH

SEQ ID NO: 1457 - protein, 5 aa, Homo sapiens
NISVN

SEQ ID NO: 1458 - protein, 5 aa, Homo sapiens
TISPY

SEQ ID NO: 1459 - protein, 5 aa, Homo sapiens
PPHTN

SEQ ID NO: 1460 - protein, 5 aa, Homo sapiens
DSDRD

SEQ ID NO: 1461 - protein, 5 aa, Homo sapiens
KDLVI

SEQ ID NO: 1462 - protein, 5 aa, Homo sapiens
LELNQ

SEQ ID NO: 1463 - protein, 5 aa, Homo sapiens
SFEFS

SEQ ID NO: 1464 - protein, 5 aa, Homo sapiens
SFGLN

SEQ ID NO: 1465 - protein, 5 aa, Homo sapiens
SFPFS

SEQ ID NO: 1466 - protein, 5 aa, Homo sapiens
NNLGF

SEQ ID NO: 1467 - protein, 5 aa, Homo sapiens
SEFLE

SEQ ID NO: 1468 - protein, 5 aa, Homo sapiens
AESGL

SEQ ID NO: 1469 - protein, 5 aa, Homo sapiens
LDEDS

SEQ ID NO: 1470 - protein, 5 aa, Homo sapiens
SVPCS

SEQ ID NO: 1471 - protein, 5 aa, Homo sapiens
PNNNR

SEQ ID NO: 1472 - protein, 5 aa, Homo sapiens
QKIFL

SEQ ID NO: 1473 - protein, 5 aa, Homo sapiens
KPFCA

SEQ ID NO: 1474 - protein, 5 aa, Homo sapiens
ERRAK

SEQ ID NO: 1475 - protein, 5 aa, Homo sapiens
SKCSS

SEQ ID NO: 1476 - protein, 5 aa, Homo sapiens
WIIES

SEQ ID NO: 1477 - protein, 5 aa, Homo sapiens
KCVKQ

SEQ ID NO: 1478 - protein, 5 aa, Homo sapiens
QQTTL

SEQ ID NO: 1479 - protein, 5 aa, Homo sapiens
SSRCL

SEQ ID NO: 1480 - protein, 5 aa, Homo sapiens
WCEEK

SEQ ID NO: 1481 - protein, 5 aa, Homo sapiens
LERLH

SEQ ID NO: 1482 - protein, 5 aa, Homo sapiens
PDYFL

SEQ ID NO: 1483 - protein, 5 aa, Homo sapiens
LFHQK

SEQ ID NO: 1484 - protein, 5 aa, Homo sapiens
NDYIF

SEQ ID NO: 1485 - protein, 5 aa, Homo sapiens
VLDVA

SEQ ID NO: 1486 - protein, 5 aa, Homo sapiens
IKVES

SEQ ID NO: 1487 - protein, 5 aa, Homo sapiens
PVQRM

SEQ ID NO: 1488 - protein, 5 aa, Homo sapiens
ISSVS

SEQ ID NO: 1489 - protein, 5 aa, Homo sapiens
EEFLP

SEQ ID NO: 1490 - protein, 5 aa, Homo sapiens
LFPFL

SEQ ID NO: 1491 - protein, 5 aa, Homo sapiens
DYSPE

SEQ ID NO: 1492 - protein, 5 aa, Homo sapiens
EVEAT

SEQ ID NO: 1493 - protein, 5 aa, Homo sapiens
GDRAK

SEQ ID NO: 1494 - protein, 5 aa, Homo sapiens
EFLRK

SEQ ID NO: 1495 - protein, 5 aa, Homo sapiens
VFERC

SEQ ID NO: 1496 - protein, 5 aa, Homo sapiens
PSSKL

SEQ ID NO: 1497 - protein, 5 aa, Homo sapiens
PMAGG

SEQ ID NO: 1498 - protein, 5 aa, Homo sapiens
VILCL

SEQ ID NO: 1499 - protein, 5 aa, Homo sapiens
HTFPK

SEQ ID NO: 1500 - protein, 5 aa, Homo sapiens
LPKAC

SEQ ID NO: 1501 - protein, 5 aa, Homo sapiens
KAKTE

SEQ ID NO: 1502 - protein, 5 aa, Homo sapiens
GFGML

SEQ ID NO: 1503 - protein, 5 aa, Homo sapiens
VFKKK

SEQ ID NO: 1504 - protein, 5 aa, Homo sapiens
FKKVQ

SEQ ID NO: 1505 - protein, 5 aa, Homo sapiens
VPAHQ

SEQ ID NO: 1506 - protein, 5 aa, Homo sapiens
RPWRN

SEQ ID NO: 1507 - protein, 5 aa, Homo sapiens
DCGLF

SEQ ID NO: 1508 - protein, 5 aa, Homo sapiens
ILYEV

SEQ ID NO: 1509 - protein, 5 aa, Homo sapiens
IICWK

SEQ ID NO: 1510 - protein, 5 aa, Homo sapiens
KRIQP

SEQ ID NO: 1511 - protein, 5 aa, Homo sapiens
NEAQR

SEQ ID NO: 1512 - protein, 5 aa, Homo sapiens
LRIWN

SEQ ID NO: 1513 - protein, 5 aa, Homo sapiens
KTSEN

SEQ ID NO: 1514 - protein, 5 aa, Homo sapiens
SRLGV

SEQ ID NO: 1515 - protein, 5 aa, Homo sapiens
IGLDC

SEQ ID NO: 1516 - protein, 5 aa, Homo sapiens
PLLTI

SEQ ID NO: 1517 - protein, 5 aa, Homo sapiens
RRSGP

SEQ ID NO: 1518 - protein, 5 aa, Homo sapiens
VRNIK

SEQ ID NO: 1519 - protein, 5 aa, Homo sapiens
PAAGS

SEQ ID NO: 1520 - protein, 5 aa, Homo sapiens
LKENL

SEQ ID NO: 1521 - protein, 5 aa, Homo sapiens
KVHGF

SEQ ID NO: 1522 - protein, 5 aa, Homo sapiens
LPSDS

SEQ ID NO: 1523 - protein, 5 aa, Homo sapiens
MNANN

SEQ ID NO: 1524 - protein, 5 aa, Homo sapiens
MKGVE

SEQ ID NO: 1525 - protein, 5 aa, Homo sapiens
SSRYS

SEQ ID NO: 1526 - protein, 5 aa, Homo sapiens
HAKNN

SEQ ID NO: 1527 - protein, 5 aa, Homo sapiens
ENMNF

SEQ ID NO: 1528 - protein, 5 aa, Homo sapiens
GLYQE

SEQ ID NO: 1529 - protein, 5 aa, Homo sapiens
GFSPH

SEQ ID NO: 1530 - protein, 5 aa, Homo sapiens
ERHTC

SEQ ID NO: 1531 - protein, 5 aa, Homo sapiens
AGKAA

SEQ ID NO: 1532 - protein, 5 aa, Homo sapiens
HPYRR

SEQ ID NO: 1533 - protein, 5 aa, Homo sapiens
LFRTF

SEQ ID NO: 1534 - protein, 5 aa, Homo sapiens
QHDEL

SEQ ID NO: 1535 - protein, 5 aa, Homo sapiens
KTSFF

SEQ ID NO: 1536 - protein, 5 aa, Homo sapiens
FLSSA

SEQ ID NO: 1537 - protein, 5 aa, Homo sapiens
DQDEY

SEQ ID NO: 1538 - protein, 5 aa, Homo sapiens
IPFIF

SEQ ID NO: 1539 - protein, 5 aa, Homo sapiens
RSEIS

SEQ ID NO: 1540 - protein, 5 aa, Homo sapiens
IKVTT

SEQ ID NO: 1541 - protein, 5 aa, Homo sapiens
VRALQ

SEQ ID NO: 1542 - protein, 5 aa, Homo sapiens
FVKNM

SEQ ID NO: 1543 - protein, 5 aa, Homo sapiens
YKGPM

SEQ ID NO: 1544 - protein, 5 aa, Homo sapiens
EPSIC

SEQ ID NO: 1545 - protein, 5 aa, Homo sapiens
GETSG

SEQ ID NO: 1546 - protein, 5 aa, Homo sapiens
LTIIL

SEQ ID NO: 1547 - protein, 5 aa, Homo sapiens
GLLLN

SEQ ID NO: 1548 - protein, 5 aa, Homo sapiens
AFIKL

SEQ ID NO: 1549 - protein, 5 aa, Homo sapiens
INKVV

SEQ ID NO: 1550 - protein, 5 aa, Homo sapiens
TDPPK

SEQ ID NO: 1551 - protein, 5 aa, Homo sapiens
EPPQA

SEQ ID NO: 1552 - protein, 5 aa, Homo sapiens
KAHRL

SEQ ID NO: 1553 - protein, 5 aa, Homo sapiens
KSSDQ

SEQ ID NO: 1554 - protein, 5 aa, Homo sapiens
VTVSS

SEQ ID NO: 1555 - protein, 5 aa, Homo sapiens
KSNDD

SEQ ID NO: 1556 - protein, 5 aa, Homo sapiens
GDEDL

SEQ ID NO: 1557 - protein, 5 aa, Homo sapiens
ITDRK

SEQ ID NO: 1558 - protein, 5 aa, Homo sapiens
ATLLE

SEQ ID NO: 1559 - protein, 5 aa, Homo sapiens
FIPLK

SEQ ID NO: 1560 - protein, 5 aa, Homo sapiens
GTMAI

SEQ ID NO: 1561 - protein, 5 aa, Homo sapiens
MAEDY

SEQ ID NO: 1562 - protein, 5 aa, Homo sapiens
LSQAR

SEQ ID NO: 1563 - protein, 5 aa, Homo sapiens
LASVV

SEQ ID NO: 1564 - protein, 5 aa, Homo sapiens
SEGST

SEQ ID NO: 1565 - protein, 5 aa, Homo sapiens
LSQND

SEQ ID NO: 1566 - protein, 5 aa, Homo sapiens
EGTLD

SEQ ID NO: 1567 - protein, 5 aa, Homo sapiens
IVFDK

SEQ ID NO: 1568 - protein, 5 aa, Homo sapiens
LNRYY

SEQ ID NO: 1569 - protein, 5 aa, Homo sapiens
PAFEL

SEQ ID NO: 1570 - protein, 5 aa, Homo sapiens
CKFKN

SEQ ID NO: 1571 - protein, 5 aa, Homo sapiens
SGRKH

SEQ ID NO: 1572 - protein, 5 aa, Homo sapiens
TQRMQ

SEQ ID NO: 1573 - protein, 5 aa, Homo sapiens
SSNVE

SEQ ID NO: 1574 - protein, 5 aa, Homo sapiens
TGLTE

SEQ ID NO: 1575 - protein, 5 aa, Homo sapiens
VHSEF

SEQ ID NO: 1576 - protein, 5 aa, Homo sapiens
EYLPQ

SEQ ID NO: 1577 - protein, 5 aa, Homo sapiens
GKYVD

SEQ ID NO: 1578 - protein, 5 aa, Homo sapiens
DALGA

SEQ ID NO: 1579 - protein, 5 aa, Homo sapiens
HVPLG

SEQ ID NO: 1580 - protein, 5 aa, Homo sapiens
LSLCL

SEQ ID NO: 1581 - protein, 5 aa, Homo sapiens
AAQKQ

SEQ ID NO: 1582 - protein, 5 aa, Homo sapiens
VLSES

SEQ ID NO: 1583 - protein, 5 aa, Homo sapiens
GSEKP

SEQ ID NO: 1584 - protein, 5 aa, Homo sapiens
GPGPA

SEQ ID NO: 1585 - protein, 5 aa, Homo sapiens
TFVRF

SEQ ID NO: 1586 - protein, 5 aa, Homo sapiens
KSWAP

SEQ ID NO: 1587 - protein, 5 aa, Homo sapiens
KALCG

SEQ ID NO: 1588 - protein, 5 aa, Homo sapiens
ASINV

SEQ ID NO: 1589 - protein, 5 aa, Homo sapiens
TGRHI

SEQ ID NO: 1590 - protein, 5 aa, Homo sapiens
ASESP

SEQ ID NO: 1591 - protein, 5 aa, Homo sapiens
KKQRK

SEQ ID NO: 1592 - protein, 5 aa, Homo sapiens
MEEDP

SEQ ID NO: 1593 - protein, 5 aa, Homo sapiens
TKEEL

SEQ ID NO: 1594 - protein, 5 aa, Homo sapiens
AGTIF

SEQ ID NO: 1595 - protein, 5 aa, Homo sapiens
KESVL

SEQ ID NO: 1596 - protein, 5 aa, Homo sapiens
EEEEA

SEQ ID NO: 1597 - protein, 5 aa, Homo sapiens
QPKNK

SEQ ID NO: 1598 - protein, 5 aa, Homo sapiens
SRTGK

SEQ ID NO: 1599 - protein, 5 aa, Homo sapiens
AKGRP

SEQ ID NO: 1600 - protein, 5 aa, Homo sapiens
DNAPL

SEQ ID NO: 1601 - protein, 5 aa, Homo sapiens
VPSEP

SEQ ID NO: 1602 - protein, 5 aa, Homo sapiens
PGSQE

SEQ ID NO: 1603 - protein, 5 aa, Homo sapiens
KKANT

SEQ ID NO: 1604 - protein, 5 aa, Homo sapiens
PDTAL

SEQ ID NO: 1605 - protein, 5 aa, Homo sapiens
LIKEL

SEQ ID NO: 1606 - protein, 5 aa, Homo sapiens
PSFSS

SEQ ID NO: 1607 - protein, 5 aa, Homo sapiens
DFYDK

SEQ ID NO: 1608 - protein, 5 aa, Homo sapiens
NPLAK

SEQ ID NO: 1609 - protein, 5 aa, Homo sapiens
KDMSL

SEQ ID NO: 1610 - protein, 5 aa, Homo sapiens
QLSIA

SEQ ID NO: 1611 - protein, 5 aa, Homo sapiens
GNMMF

SEQ ID NO: 1612 - protein, 5 aa, Homo sapiens
FPAPD

SEQ ID NO: 1613 - protein, 5 aa, Homo sapiens
IKPID

SEQ ID NO: 1614 - protein, 5 aa, Homo sapiens
LDMDL

SEQ ID NO: 1615 - protein, 5 aa, Homo sapiens
GGAAA

SEQ ID NO: 1616 - protein, 5 aa, Homo sapiens
ASVTE

SEQ ID NO: 1617 - protein, 5 aa, Homo sapiens
AQTRL

SEQ ID NO: 1618 - protein, 5 aa, Homo sapiens
EKKMT

SEQ ID NO: 1619 - protein, 5 aa, Homo sapiens
EEDIT

SEQ ID NO: 1620 - protein, 5 aa, Homo sapiens
LQPSR

SEQ ID NO: 1621 - protein, 5 aa, Homo sapiens
PRQKP

SEQ ID NO: 1622 - protein, 5 aa, Homo sapiens
GKGAV

SEQ ID NO: 1623 - protein, 5 aa, Homo sapiens
FHLCS

SEQ ID NO: 1624 - protein, 5 aa, Homo sapiens
DQYCC

SEQ ID NO: 1625 - protein, 5 aa, Homo sapiens
PFFKE

SEQ ID NO: 1626 - protein, 5 aa, Homo sapiens
EPHAT

SEQ ID NO: 1627 - protein, 5 aa, Homo sapiens
WKIKS

SEQ ID NO: 1628 - protein, 5 aa, Homo sapiens
LVGFL

SEQ ID NO: 1629 - protein, 5 aa, Homo sapiens
KSKTQ

SEQ ID NO: 1630 - protein, 5 aa, Homo sapiens
APSAQ

SEQ ID NO: 1631 - protein, 5 aa, Homo sapiens
FSNVV

SEQ ID NO: 1632 - protein, 5 aa, Homo sapiens
APSRK

SEQ ID NO: 1633 - protein, 5 aa, Homo sapiens
EHMRM

SEQ ID NO: 1634 - protein, 5 aa, Homo sapiens
PNYFR

SEQ ID NO: 1635 - protein, 5 aa, Homo sapiens
SWSCC

SEQ ID NO: 1636 - protein, 5 aa, Homo sapiens
ALQAL

SEQ ID NO: 1637 - protein, 5 aa, Homo sapiens
LGSSS

SEQ ID NO: 1638 - protein, 5 aa, Homo sapiens
KNRTH

SEQ ID NO: 1639 - protein, 5 aa, Homo sapiens
VKMGD

SEQ ID NO: 1640 - protein, 5 aa, Homo sapiens
YCNLQ

SEQ ID NO: 1641 - protein, 5 aa, Homo sapiens
QVTTS

SEQ ID NO: 1642 - protein, 5 aa, Homo sapiens
MNDPY

SEQ ID NO: 1643 - protein, 5 aa, Homo sapiens
TLTFY

SEQ ID NO: 1644 - protein, 5 aa, Homo sapiens
MKYRT

SEQ ID NO: 1645 - protein, 5 aa, Homo sapiens
RGTAV

SEQ ID NO: 1646 - protein, 5 aa, Homo sapiens
ETEAD

SEQ ID NO: 1647 - protein, 5 aa, Homo sapiens
WGYFA

SEQ ID NO: 1648 - protein, 5 aa, Homo sapiens
EAARL

SEQ ID NO: 1649 - protein, 5 aa, Homo sapiens
GPGNK

SEQ ID NO: 1650 - protein, 5 aa, Homo sapiens
NCRYG

SEQ ID NO: 1651 - protein, 5 aa, Homo sapiens
KLNTQ

SEQ ID NO: 1652 - protein, 5 aa, Homo sapiens
HIRGF

SEQ ID NO: 1653 - protein, 5 aa, Homo sapiens
KMGLH

SEQ ID NO: 1654 - protein, 5 aa, Homo sapiens
AGEDA

SEQ ID NO: 1655 - protein, 5 aa, Homo sapiens
LPTKA

SEQ ID NO: 1656 - protein, 5 aa, Homo sapiens
KATAE

SEQ ID NO: 1657 - protein, 5 aa, Homo sapiens
AFNKI

SEQ ID NO: 1658 - protein, 5 aa, Homo sapiens
RLFHH

SEQ ID NO: 1659 - protein, 5 aa, Homo sapiens
QGVLH

SEQ ID NO: 1660 - protein, 5 aa, Homo sapiens
YRSHL

SEQ ID NO: 1661 - protein, 5 aa, Homo sapiens
VQSTQ

SEQ ID NO: 1662 - protein, 5 aa, Homo sapiens
CHKSD

SEQ ID NO: 1663 - protein, 5 aa, Homo sapiens
TNPKE

SEQ ID NO: 1664 - protein, 5 aa, Homo sapiens
GGGKG

SEQ ID NO: 1665 - protein, 5 aa, Homo sapiens
VTTQF

SEQ ID NO: 1666 - protein, 5 aa, Homo sapiens
AFLKM

SEQ ID NO: 1667 - protein, 5 aa, Homo sapiens
EPKPS

SEQ ID NO: 1668 - protein, 5 aa, Homo sapiens
SEWNE

SEQ ID NO: 1669 - protein, 5 aa, Homo sapiens
YLADN

SEQ ID NO: 1670 - protein, 5 aa, Homo sapiens
APGYT

SEQ ID NO: 1671 - protein, 5 aa, Homo sapiens
QNEVT

SEQ ID NO: 1672 - protein, 5 aa, Homo sapiens
RKEIL

SEQ ID NO: 1673 - protein, 5 aa, Homo sapiens
ASRAQ

SEQ ID NO: 1674 - protein, 5 aa, Homo sapiens
LKPVL

SEQ ID NO: 1675 - protein, 5 aa, Homo sapiens
ECQKS

SEQ ID NO: 1676 - protein, 5 aa, Homo sapiens
KQMYG

SEQ ID NO: 1677 - protein, 5 aa, Homo sapiens
GTTAS

SEQ ID NO: 1678 - protein, 5 aa, Homo sapiens
GSSYC

SEQ ID NO: 1679 - protein, 5 aa, Homo sapiens
PLKPT

SEQ ID NO: 1680 - protein, 5 aa, Homo sapiens
NDVPS

SEQ ID NO: 1681 - protein, 5 aa, Homo sapiens
KDKDD

SEQ ID NO: 1682 - protein, 5 aa, Homo sapiens
PIPSF

SEQ ID NO: 1683 - protein, 5 aa, Homo sapiens
RNSQG

SEQ ID NO: 1684 - protein, 5 aa, Homo sapiens
KRTAH

SEQ ID NO: 1685 - protein, 5 aa, Homo sapiens
LPPSE

SEQ ID NO: 1686 - protein, 5 aa, Homo sapiens
RTKSN

SEQ ID NO: 1687 - protein, 5 aa, Homo sapiens
SNVHV

SEQ ID NO: 1688 - protein, 5 aa, Homo sapiens
LKKYS

SEQ ID NO: 1689 - protein, 5 aa, Homo sapiens
WWGIH

SEQ ID NO: 1690 - protein, 5 aa, Homo sapiens
PVSVM

SEQ ID NO: 1691 - protein, 5 aa, Homo sapiens
LSPAG

SEQ ID NO: 1692 - protein, 5 aa, Homo sapiens
ELSNF

SEQ ID NO: 1693 - protein, 5 aa, Homo sapiens
SLPSL

SEQ ID NO: 1694 - protein, 5 aa, Homo sapiens
VLQMV

SEQ ID NO: 1695 - protein, 5 aa, Homo sapiens
FAKFI

SEQ ID NO: 1696 - protein, 5 aa, Homo sapiens
CYFSE

SEQ ID NO: 1697 - protein, 5 aa, Homo sapiens
AESWS

SEQ ID NO: 1698 - protein, 5 aa, Homo sapiens
IGALQ

SEQ ID NO: 1699 - protein, 5 aa, Homo sapiens
DKKHH

SEQ ID NO: 1700 - protein, 5 aa, Homo sapiens
PPPFP

SEQ ID NO: 1701 - protein, 5 aa, Homo sapiens
NYDDY

SEQ ID NO: 1702 - protein, 5 aa, Homo sapiens
EGAEN

SEQ ID NO: 1703 - protein, 5 aa, Homo sapiens
LTPVH

SEQ ID NO: 1704 - protein, 5 aa, Homo sapiens
LGEET

SEQ ID NO: 1705 - protein, 5 aa, Homo sapiens
LEDDC

SEQ ID NO: 1706 - protein, 5 aa, Homo sapiens
TDRTV

SEQ ID NO: 1707 - protein, 5 aa, Homo sapiens
IDWLG

SEQ ID NO: 1708 - protein, 5 aa, Homo sapiens
NASAR

SEQ ID NO: 1709 - protein, 5 aa, Homo sapiens
RYSTP

SEQ ID NO: 1710 - protein, 5 aa, Homo sapiens
STPGL

SEQ ID NO: 1711 - protein, 5 aa, Homo sapiens
TKLLV

SEQ ID NO: 1712 - protein, 5 aa, Homo sapiens
FGQEG

SEQ ID NO: 1713 - protein, 5 aa, Homo sapiens
RLCSP

SEQ ID NO: 1714 - protein, 5 aa, Homo sapiens
DQEVN

SEQ ID NO: 1715 - protein, 5 aa, Homo sapiens
LDSDS

SEQ ID NO: 1716 - protein, 5 aa, Homo sapiens
AFDIR

SEQ ID NO: 1717 - protein, 5 aa, Homo sapiens
AVPRR

SEQ ID NO: 1718 - protein, 5 aa, Homo sapiens
EKHEE

SEQ ID NO: 1719 - protein, 5 aa, Homo sapiens
CRPSL

SEQ ID NO: 1720 - protein, 5 aa, Homo sapiens
FQIVK

SEQ ID NO: 1721 - protein, 5 aa, Homo sapiens
QARHT

SEQ ID NO: 1722 - protein, 5 aa, Homo sapiens
IVSHL

SEQ ID NO: 1723 - protein, 5 aa, Homo sapiens
SFRPM

SEQ ID NO: 1724 - protein, 5 aa, Homo sapiens
KERDP

SEQ ID NO: 1725 - protein, 5 aa, Homo sapiens
IPSKV

SEQ ID NO: 1726 - protein, 5 aa, Homo sapiens
SEDHL

SEQ ID NO: 1727 - protein, 5 aa, Homo sapiens
SCKCS

SEQ ID NO: 1728 - protein, 5 aa, Homo sapiens
KSNWR

SEQ ID NO: 1729 - protein, 5 aa, Homo sapiens
EKKDF

SEQ ID NO: 1730 - protein, 5 aa, Homo sapiens
TGRLA

SEQ ID NO: 1731 - protein, 5 aa, Homo sapiens
LTLNR

SEQ ID NO: 1732 - protein, 5 aa, Homo sapiens
LELPQ

SEQ ID NO: 1733 - protein, 5 aa, Homo sapiens
CCLIT

SEQ ID NO: 1734 - protein, 5 aa, Homo sapiens
PVPSV

SEQ ID NO: 1735 - protein, 5 aa, Homo sapiens
LISQQ

SEQ ID NO: 1736 - protein, 5 aa, Homo sapiens
FETFL

SEQ ID NO: 1737 - protein, 5 aa, Homo sapiens
LYTGV

SEQ ID NO: 1738 - protein, 5 aa, Homo sapiens
EKADG

SEQ ID NO: 1739 - protein, 5 aa, Homo sapiens
ITKLG

SEQ ID NO: 1740 - protein, 5 aa, Homo sapiens
KQTSV

SEQ ID NO: 1741 - protein, 5 aa, Homo sapiens
FQTEV

SEQ ID NO: 1742 - protein, 5 aa, Homo sapiens
DVKMV

SEQ ID NO: 1743 - protein, 5 aa, Homo sapiens
LSKKH

SEQ ID NO: 1744 - protein, 5 aa, Homo sapiens
SEDKK

SEQ ID NO: 1745 - protein, 5 aa, Homo sapiens
LASYR

SEQ ID NO: 1746 - protein, 5 aa, Homo sapiens
VSVVI

SEQ ID NO: 1747 - protein, 5 aa, Homo sapiens
GRARA

SEQ ID NO: 1748 - protein, 5 aa, Homo sapiens
QLMLQ

SEQ ID NO: 1749 - protein, 5 aa, Homo sapiens
KGDKK

SEQ ID NO: 1750 - protein, 5 aa, Homo sapiens
SAFQP

SEQ ID NO: 1751 - protein, 5 aa, Homo sapiens
EEEEE

SEQ ID NO: 1752 - protein, 5 aa, Homo sapiens
TSPSC

SEQ ID NO: 1753 - protein, 5 aa, Homo sapiens
LPNFS

SEQ ID NO: 1754 - protein, 5 aa, Homo sapiens
MYHLS

SEQ ID NO: 1755 - protein, 5 aa, Homo sapiens
VKLCT

SEQ ID NO: 1756 - protein, 5 aa, Homo sapiens
LRRKD

SEQ ID NO: 1757 - protein, 5 aa, Homo sapiens
NGMYL

SEQ ID NO: 1758 - protein, 5 aa, Homo sapiens
SQPLT

SEQ ID NO: 1759 - protein, 5 aa, Homo sapiens
SLQLK

SEQ ID NO: 1760 - protein, 5 aa, Homo sapiens
GFNIQ

SEQ ID NO: 1761 - protein, 5 aa, Homo sapiens
GLNIQ

SEQ ID NO: 1762 - protein, 5 aa, Homo sapiens
NNLGF

SEQ ID NO: 1763 - protein, 5 aa, Homo sapiens
QLEAY

SEQ ID NO: 1764 - protein, 5 aa, Homo sapiens
PQFIS

SEQ ID NO: 1765 - protein, 5 aa, Homo sapiens
NKQHS

SEQ ID NO: 1766 - protein, 5 aa, Homo sapiens
QKCIH

SEQ ID NO: 1767 - protein, 5 aa, Homo sapiens
ERTVH

SEQ ID NO: 1768 - protein, 5 aa, Homo sapiens
VNTEN

SEQ ID NO: 1769 - protein, 5 aa, Homo sapiens
CVEFH

SEQ ID NO: 1770 - protein, 5 aa, Homo sapiens
EHSVI

SEQ ID NO: 1771 - protein, 5 aa, Homo sapiens
ELRLC

SEQ ID NO: 1772 - protein, 5 aa, Homo sapiens
VRDID

SEQ ID NO: 1773 - protein, 5 aa, Homo sapiens
HYMSC

SEQ ID NO: 1774 - protein, 5 aa, Homo sapiens
EPNSF

SEQ ID NO: 1775 - protein, 5 aa, Homo sapiens
TRKMN

SEQ ID NO: 1776 - protein, 5 aa, Homo sapiens
SMKPK

SEQ ID NO: 1777 - protein, 5 aa, Homo sapiens
LIEEN

SEQ ID NO: 1778 - protein, 5 aa, Homo sapiens
ESEEL

SEQ ID NO: 1779 - protein, 5 aa, Homo sapiens
TIEIC

SEQ ID NO: 1780 - protein, 5 aa, Homo sapiens
RDSGF

SEQ ID NO: 1781 - protein, 5 aa, Homo sapiens
IRMGM

SEQ ID NO: 1782 - protein, 5 aa, Homo sapiens
LNVEE

SEQ ID NO: 1783 - protein, 5 aa, Homo sapiens
QIQFS

SEQ ID NO: 1784 - protein, 5 aa, Homo sapiens
SSFSD

SEQ ID NO: 1785 - protein, 5 aa, Homo sapiens
DGTSA

SEQ ID NO: 1786 - protein, 5 aa, Homo sapiens
TSPSC

SEQ ID NO: 1787 - protein, 5 aa, Homo sapiens
YVAPV

SEQ ID NO: 1788 - protein, 5 aa, Homo sapiens
LAGMI

SEQ ID NO: 1789 - protein, 5 aa, Homo sapiens
SGWGM

SEQ ID NO: 1790 - protein, 5 aa, Homo sapiens
LHLCC

SEQ ID NO: 1791 - protein, 5 aa, Homo sapiens
AKNGI

SEQ ID NO: 1792 - protein, 5 aa, Homo sapiens
DTQSN

SEQ ID NO: 1793 - protein, 5 aa, Homo sapiens
SPQMM

SEQ ID NO: 1794 - protein, 5 aa, Homo sapiens
STEPA

SEQ ID NO: 1795 - protein, 5 aa, Homo sapiens
RLKQS

SEQ ID NO: 1796 - protein, 5 aa, Homo sapiens
RESPK

SEQ ID NO: 1797 - protein, 5 aa, Homo sapiens
KKTSH

SEQ ID NO: 1798 - protein, 5 aa, Homo sapiens
NWTDG

SEQ ID NO: 1799 - protein, 5 aa, Homo sapiens
LFKSG

SEQ ID NO: 1800 - protein, 5 aa, Homo sapiens
MELTM

SEQ ID NO: 1801 - protein, 5 aa, Homo sapiens
SDLSD

SEQ ID NO: 1802 - protein, 5 aa, Homo sapiens
SSLMV

SEQ ID NO: 1803 - protein, 5 aa, Homo sapiens
VRQGD

SEQ ID NO: 1804 - protein, 5 aa, Homo sapiens
FDYID

SEQ ID NO: 1805 - protein, 5 aa, Homo sapiens
KKIHT

SEQ ID NO: 1806 - protein, 5 aa, Homo sapiens
IACMI

SEQ ID NO: 1807 - protein, 5 aa, Homo sapiens
KLDIK

SEQ ID NO: 1808 - protein, 5 aa, Homo sapiens
MQRTV

SEQ ID NO: 1809 - protein, 5 aa, Homo sapiens
NLRVT

SEQ ID NO: 1810 - protein, 5 aa, Homo sapiens
EDYFD

SEQ ID NO: 1811 - protein, 5 aa, Homo sapiens
NYLPL

SEQ ID NO: 1812 - protein, 5 aa, Homo sapiens
NTSES

SEQ ID NO: 1813 - protein, 5 aa, Homo sapiens
QHKQI

SEQ ID NO: 1814 - protein, 5 aa, Homo sapiens
KPFVP

SEQ ID NO: 1815 - protein, 5 aa, Homo sapiens
MWQES

SEQ ID NO: 1816 - protein, 5 aa, Homo sapiens
PEAQR

SEQ ID NO: 1817 - protein, 5 aa, Homo sapiens
GPGYR

SEQ ID NO: 1818 - protein, 5 aa, Homo sapiens
QKTDN

SEQ ID NO: 1819 - protein, 5 aa, Homo sapiens
DDLTV

SEQ ID NO: 1820 - protein, 5 aa, Homo sapiens
WPRLQ

SEQ ID NO: 1821 - protein, 5 aa, Homo sapiens
DIYLE

SEQ ID NO: 1822 - protein, 5 aa, Homo sapiens
LPGHP

SEQ ID NO: 1823 - protein, 5 aa, Homo sapiens
EHFGD

SEQ ID NO: 1824 - protein, 5 aa, Homo sapiens
EKANL

SEQ ID NO: 1825 - protein, 5 aa, Homo sapiens
PAPET

SEQ ID NO: 1826 - protein, 5 aa, Homo sapiens
TGFPS

SEQ ID NO: 1827 - protein, 5 aa, Homo sapiens
EDLAI

SEQ ID NO: 1828 - protein, 5 aa, Homo sapiens
SSINT

SEQ ID NO: 1829 - protein, 5 aa, Homo sapiens
TTYRF

SEQ ID NO: 1830 - protein, 5 aa, Homo sapiens
PKSFP

SEQ ID NO: 1831 - protein, 5 aa, Homo sapiens
RRQRG

SEQ ID NO: 1832 - protein, 5 aa, Homo sapiens
SFHSS

SEQ ID NO: 1833 - protein, 5 aa, Homo sapiens
KESSL

SEQ ID NO: 1834 - protein, 5 aa, Homo sapiens
DIFFK

SEQ ID NO: 1835 - protein, 5 aa, Homo sapiens
PSALG

SEQ ID NO: 1836 - protein, 5 aa, Homo sapiens
FVTVG

SEQ ID NO: 1837 - protein, 5 aa, Homo sapiens
DDEEE

SEQ ID NO: 1838 - protein, 5 aa, Homo sapiens
MSHSL

SEQ ID NO: 1839 - protein, 5 aa, Homo sapiens
ETMPN

SEQ ID NO: 1840 - protein, 5 aa, Homo sapiens
HQGLL

SEQ ID NO: 1841 - protein, 5 aa, Homo sapiens
TCRRH

SEQ ID NO: 1842 - protein, 5 aa, Homo sapiens
SLQKR

SEQ ID NO: 1843 - protein, 5 aa, Homo sapiens
SSGFL

SEQ ID NO: 1844 - protein, 5 aa, Homo sapiens
IKFFK

SEQ ID NO: 1845 - protein, 5 aa, Homo sapiens
EGYVY

SEQ ID NO: 1846 - protein, 5 aa, Homo sapiens
QGVSE

SEQ ID NO: 1847 - protein, 5 aa, Homo sapiens
EMVHS

SEQ ID NO: 1848 - protein, 5 aa, Homo sapiens
IKHER

SEQ ID NO: 1849 - protein, 5 aa, Homo sapiens
TFNIC

SEQ ID NO: 1850 - protein, 5 aa, Homo sapiens
TITKY

SEQ ID NO: 1851 - protein, 5 aa, Homo sapiens
QASAR

SEQ ID NO: 1852 - protein, 5 aa, Homo sapiens
DPAMW

SEQ ID NO: 1853 - protein, 5 aa, Homo sapiens
TLSTD

SEQ ID NO: 1854 - protein, 5 aa, Homo sapiens
EDEEE

SEQ ID NO: 1855 - protein, 5 aa, Homo sapiens
ECGCS

SEQ ID NO: 1856 - protein, 5 aa, Homo sapiens
KHDEL

SEQ ID NO: 1857 - protein, 5 aa, Homo sapiens
LQKIL

SEQ ID NO: 1858 - protein, 5 aa, Homo sapiens
TDTLL

SEQ ID NO: 1859 - protein, 5 aa, Homo sapiens
GTVKQ

SEQ ID NO: 1860 - protein, 5 aa, Homo sapiens
MSASH

SEQ ID NO: 1861 - protein, 5 aa, Homo sapiens
LLKVI

SEQ ID NO: 1862 - protein, 5 aa, Homo sapiens
APLVH

SEQ ID NO: 1863 - protein, 5 aa, Homo sapiens
DGHGK

SEQ ID NO: 1864 - protein, 5 aa, Homo sapiens
LKPPG

SEQ ID NO: 1865 - protein, 5 aa, Homo sapiens
VKIKT

SEQ ID NO: 1866 - protein, 5 aa, Homo sapiens
SSLLI

SEQ ID NO: 1867 - protein, 5 aa, Homo sapiens
ACVIS

SEQ ID NO: 1868 - protein, 5 aa, Homo sapiens
QNFHS

SEQ ID NO: 1869 - protein, 5 aa, Homo sapiens
FHDEY

SEQ ID NO: 1870 - protein, 5 aa, Homo sapiens
FSDFL

SEQ ID NO: 1871 - protein, 5 aa, Homo sapiens
EDFML

SEQ ID NO: 1872 - protein, 5 aa, Homo sapiens
LCIVQ

SEQ ID NO: 1873 - protein, 5 aa, Homo sapiens
RTRTP

SEQ ID NO: 1874 - protein, 5 aa, Homo sapiens
TRQGP

SEQ ID NO: 1875 - protein, 5 aa, Homo sapiens
DWKEL

SEQ ID NO: 1876 - protein, 5 aa, Homo sapiens
LFKSG

SEQ ID NO: 1877 - protein, 5 aa, Homo sapiens
DRLIL

SEQ ID NO: 1878 - protein, 5 aa, Homo sapiens
RSYRS

SEQ ID NO: 1879 - protein, 5 aa, Homo sapiens
LGEVN

SEQ ID NO: 1880 - protein, 5 aa, Homo sapiens
DWVYE

SEQ ID NO: 1881 - protein, 5 aa, Homo sapiens
SYETN

SEQ ID NO: 1882 - protein, 5 aa, Homo sapiens
GKEAP

SEQ ID NO: 1883 - protein, 5 aa, Homo sapiens
PQQKI

SEQ ID NO: 1884 - protein, 5 aa, Homo sapiens
WILNN

SEQ ID NO: 1885 - protein, 5 aa, Homo sapiens
LLFSL

SEQ ID NO: 1886 - protein, 5 aa, Homo sapiens
IEQSR

SEQ ID NO: 1887 - protein, 5 aa, Homo sapiens
RPLVK

SEQ ID NO: 1888 - protein, 5 aa, Homo sapiens
SESGI

SEQ ID NO: 1889 - protein, 5 aa, Homo sapiens
EDGAG

SEQ ID NO: 1890 - protein, 5 aa, Homo sapiens
WRDTL

SEQ ID NO: 1891 - protein, 5 aa, Homo sapiens
KCFKL

SEQ ID NO: 1892 - protein, 5 aa, Homo sapiens
SRGRA

SEQ ID NO: 1893 - protein, 5 aa, Homo sapiens
VKKFQ

SEQ ID NO: 1894 - protein, 5 aa, Homo sapiens
EEQYI

SEQ ID NO: 1895 - protein, 5 aa, Homo sapiens
ELCVS

SEQ ID NO: 1896 - protein, 5 aa, Homo sapiens
EAFHQ

SEQ ID NO: 1897 - protein, 5 aa, Homo sapiens
TVFTE

SEQ ID NO: 1898 - protein, 5 aa, Homo sapiens
GINKY

SEQ ID NO: 1899 - protein, 5 aa, Homo sapiens
NGNLD

SEQ ID NO: 1900 - protein, 5 aa, Homo sapiens
HLHST

SEQ ID NO: 1901 - protein, 5 aa, Homo sapiens
GDPLA

SEQ ID NO: 1902 - protein, 5 aa, Homo sapiens
GNPLL

SEQ ID NO: 1903 - protein, 5 aa, Homo sapiens
ALSFF

SEQ ID NO: 1904 - protein, 5 aa, Homo sapiens
EKQKE

SEQ ID NO: 1905 - protein, 5 aa, Homo sapiens
YQSHL

SEQ ID NO: 1906 - protein, 5 aa, Homo sapiens
EKQSS

SEQ ID NO: 1907 - protein, 5 aa, Homo sapiens
LWIPI

SEQ ID NO: 1908 - protein, 5 aa, Homo sapiens
FFCDT

SEQ ID NO: 1909 - protein, 5 aa, Homo sapiens
LVAPM

SEQ ID NO: 1910 - protein, 5 aa, Homo sapiens
GALLF

SEQ ID NO: 1911 - protein, 5 aa, Homo sapiens
DIPYL

SEQ ID NO: 1912 - protein, 5 aa, Homo sapiens
WQQRK

SEQ ID NO: 1913 - protein, 5 aa, Homo sapiens
GSSCC

SEQ ID NO: 1914 - protein, 5 aa, Homo sapiens
SNYDV

SEQ ID NO: 1915 - protein, 5 aa, Homo sapiens
EQEGV

SEQ ID NO: 1916 - protein, 5 aa, Homo sapiens
SSSCC

SEQ ID NO: 1917 - protein, 5 aa, Homo sapiens
HENSI

SEQ ID NO: 1918 - protein, 5 aa, Homo sapiens
ASLRP

SEQ ID NO: 1919 - protein, 5 aa, Homo sapiens
AYFEE

SEQ ID NO: 1920 - protein, 5 aa, Homo sapiens
RFSHL

SEQ ID NO: 1921 - protein, 5 aa, Homo sapiens
EDCKA

SEQ ID NO: 1922 - protein, 5 aa, Homo sapiens
TCAFI

SEQ ID NO: 1923 - protein, 5 aa, Homo sapiens
GCLPR

SEQ ID NO: 1924 - protein, 5 aa, Homo sapiens
KLESE

SEQ ID NO: 1925 - protein, 5 aa, Homo sapiens
RESEI

SEQ ID NO: 1926 - protein, 5 aa, Homo sapiens
EKTDL

SEQ ID NO: 1927 - protein, 5 aa, Homo sapiens
SFAKK

SEQ ID NO: 1928 - protein, 5 aa, Homo sapiens
YGVEC

SEQ ID NO: 1929 - protein, 5 aa, Homo sapiens
KAKLL

SEQ ID NO: 1930 - protein, 5 aa, Homo sapiens
SGEKP

SEQ ID NO: 1931 - protein, 5 aa, Homo sapiens
PYKRN

SEQ ID NO: 1932 - protein, 5 aa, Homo sapiens
VTENP

SEQ ID NO: 1933 - protein, 5 aa, Homo sapiens
GCAKS

SEQ ID NO: 1934 - protein, 5 aa, Homo sapiens
IVTMS

SEQ ID NO: 1935 - protein, 5 aa, Homo sapiens
VSLED

SEQ ID NO: 1936 - protein, 5 aa, Homo sapiens
QGNST

SEQ ID NO: 1937 - protein, 5 aa, Homo sapiens
HCACI

SEQ ID NO: 1938 - protein, 5 aa, Homo sapiens
PSGFK

SEQ ID NO: 1939 - protein, 5 aa, Homo sapiens
VESEK

SEQ ID NO: 1940 - protein, 5 aa, Homo sapiens
VKMDD

SEQ ID NO: 1941 - protein, 5 aa, Homo sapiens
AQGQQ

SEQ ID NO: 1942 - protein, 5 aa, Homo sapiens
AGEQA

SEQ ID NO: 1943 - protein, 5 aa, Homo sapiens
NTMDK

SEQ ID NO: 1944 - protein, 5 aa, Homo sapiens
PKSNV

SEQ ID NO: 1945 - protein, 5 aa, Homo sapiens
DDDDE

SEQ ID NO: 1946 - protein, 5 aa, Homo sapiens
CFVPQ

SEQ ID NO: 1947 - protein, 5 aa, Homo sapiens
EIPVP

SEQ ID NO: 1948 - protein, 5 aa, Homo sapiens
ITIYS

SEQ ID NO: 1949 - protein, 5 aa, Homo sapiens
MHADR

SEQ ID NO: 1950 - protein, 5 aa, Homo sapiens
KVKKE

SEQ ID NO: 1951 - protein, 5 aa, Homo sapiens
GDNRL

SEQ ID NO: 1952 - protein, 5 aa, Homo sapiens
SSSRD

SEQ ID NO: 1953 - protein, 5 aa, Homo sapiens
KRSCC

SEQ ID NO: 1954 - protein, 5 aa, Homo sapiens
YRIRP

SEQ ID NO: 1955 - protein, 5 aa, Homo sapiens
RAVSG

SEQ ID NO: 1956 - protein, 5 aa, Homo sapiens
SGCPR

SEQ ID NO: 1957 - protein, 5 aa, Homo sapiens
TFPQY

SEQ ID NO: 1958 - protein, 5 aa, Homo sapiens
SIIDQ

SEQ ID NO: 1959 - protein, 5 aa, Homo sapiens
FSYPE

SEQ ID NO: 1960 - protein, 5 aa, Homo sapiens
FSGPK

SEQ ID NO: 1961 - protein, 5 aa, Homo sapiens
RSWTF

SEQ ID NO: 1962 - protein, 5 aa, Homo sapiens
SYTFS

SEQ ID NO: 1963 - protein, 5 aa, Homo sapiens
ELEQA

SEQ ID NO: 1964 - protein, 5 aa, Homo sapiens
PGEKY

SEQ ID NO: 1965 - protein, 5 aa, Homo sapiens
LDFIA

SEQ ID NO: 1966 - protein, 5 aa, Homo sapiens
HKLKL

SEQ ID NO: 1967 - protein, 5 aa, Homo sapiens
LPRSV

SEQ ID NO: 1968 - protein, 5 aa, Homo sapiens
VHLSY

SEQ ID NO: 1969 - protein, 5 aa, Homo sapiens
CGGRH

SEQ ID NO: 1970 - protein, 5 aa, Homo sapiens
DSEEK

SEQ ID NO: 1971 - protein, 5 aa, Homo sapiens
GSSTR

SEQ ID NO: 1972 - protein, 5 aa, Homo sapiens
CTHSP

SEQ ID NO: 1973 - protein, 5 aa, Homo sapiens
AGVLL

SEQ ID NO: 1974 - protein, 5 aa, Homo sapiens
RVALI

SEQ ID NO: 1975 - protein, 5 aa, Homo sapiens
VPAES

SEQ ID NO: 1976 - protein, 5 aa, Homo sapiens
SERPL

SEQ ID NO: 1977 - protein, 5 aa, Homo sapiens
YVEAI

SEQ ID NO: 1978 - protein, 5 aa, Homo sapiens
PLSKE

SEQ ID NO: 1979 - protein, 5 aa, Homo sapiens
SQGAP

SEQ ID NO: 1980 - protein, 5 aa, Homo sapiens
TEALY

SEQ ID NO: 1981 - protein, 5 aa, Homo sapiens
QHTRL

SEQ ID NO: 1982 - protein, 5 aa, Homo sapiens
APKKK

SEQ ID NO: 1983 - protein, 5 aa, Homo sapiens
QGRTL

SEQ ID NO: 1984 - protein, 5 aa, Homo sapiens
TVYTL

SEQ ID NO: 1985 - protein, 5 aa, Homo sapiens
ILTSA

SEQ ID NO: 1986 - protein, 5 aa, Homo sapiens
LDEKL

SEQ ID NO: 1987 - protein, 5 aa, Homo sapiens
ALSQL

SEQ ID NO: 1988 - protein, 5 aa, Homo sapiens
APKKK

SEQ ID NO: 1989 - protein, 5 aa, Homo sapiens
LHTKE

SEQ ID NO: 1990 - protein, 5 aa, Homo sapiens
YTSAK

SEQ ID NO: 1991 - protein, 5 aa, Homo sapiens
FSTYF

SEQ ID NO: 1992 - protein, 5 aa, Homo sapiens
FLIKK

SEQ ID NO: 1993 - protein, 5 aa, Homo sapiens
NIQWD

SEQ ID NO: 1994 - protein, 5 aa, Homo sapiens
CGQLE

SEQ ID NO: 1995 - protein, 5 aa, Homo sapiens
RGERA

SEQ ID NO: 1996 - protein, 5 aa, Homo sapiens
ADILK

SEQ ID NO: 1997 - protein, 5 aa, Homo sapiens
RSFVP

SEQ ID NO: 1998 - protein, 5 aa, Homo sapiens
RNCKS

SEQ ID NO: 1999 - protein, 5 aa, Homo sapiens
SPAWK

SEQ ID NO: 2000 - protein, 5 aa, Homo sapiens
KGPNY

SEQ ID NO: 2001 - protein, 5 aa, Homo sapiens
SKRKP

SEQ ID NO: 2002 - protein, 5 aa, Homo sapiens
LVFTY

SEQ ID NO: 2003 - protein, 5 aa, Homo sapiens
LHTHI

SEQ ID NO: 2004 - protein, 5 aa, Homo sapiens
GRRPR

SEQ ID NO: 2005 - protein, 5 aa, Homo sapiens
VGSDE

SEQ ID NO: 2006 - protein, 5 aa, Homo sapiens
TWLSF

SEQ ID NO: 2007 - protein, 5 aa, Homo sapiens
SNVGK

SEQ ID NO: 2008 - protein, 5 aa, Homo sapiens
HVTTV

SEQ ID NO: 2009 - protein, 5 aa, Homo sapiens
HEEWE

SEQ ID NO: 2010 - protein, 5 aa, Homo sapiens
IRGMI

SEQ ID NO: 2011 - protein, 5 aa, Homo sapiens
ELPQV

SEQ ID NO: 2012 - protein, 5 aa, Homo sapiens
GREGK

SEQ ID NO: 2013 - protein, 5 aa, Homo sapiens
KKCSV

SEQ ID NO: 2014 - protein, 5 aa, Homo sapiens
NMKSN

SEQ ID NO: 2015 - protein, 5 aa, Homo sapiens
QTSIF

SEQ ID NO: 2016 - protein, 5 aa, Homo sapiens
PQGRE

SEQ ID NO: 2017 - protein, 5 aa, Homo sapiens
PSHPR

SEQ ID NO: 2018 - protein, 5 aa, Homo sapiens
EFESV

SEQ ID NO: 2019 - protein, 5 aa, Homo sapiens
GTASS

SEQ ID NO: 2020 - protein, 5 aa, Homo sapiens
CSCCA

SEQ ID NO: 2021 - protein, 5 aa, Homo sapiens
HQVTK

SEQ ID NO: 2022 - protein, 5 aa, Homo sapiens
PGREP

SEQ ID NO: 2023 - protein, 5 aa, Homo sapiens
RLYYL

SEQ ID NO: 2024 - protein, 5 aa, Homo sapiens
ACNIQ

SEQ ID NO: 2025 - protein, 5 aa, Homo sapiens
QPDEK

SEQ ID NO: 2026 - protein, 5 aa, Homo sapiens
IYYKV

SEQ ID NO: 2027 - protein, 5 aa, Homo sapiens
KSTAF

SEQ ID NO: 2028 - protein, 5 aa, Homo sapiens
IPCAP

SEQ ID NO: 2029 - protein, 5 aa, Homo sapiens
PPLRS

SEQ ID NO: 2030 - protein, 5 aa, Homo sapiens
GCGCR

SEQ ID NO: 2031 - protein, 5 aa, Homo sapiens
KQADL

SEQ ID NO: 2032 - protein, 5 aa, Homo sapiens
QLTRP

SEQ ID NO: 2033 - protein, 5 aa, Homo sapiens
VISEE

SEQ ID NO: 2034 - protein, 5 aa, Homo sapiens
HYRWW

SEQ ID NO: 2035 - protein, 5 aa, Homo sapiens
QWGNL

SEQ ID NO: 2036 - protein, 5 aa, Homo sapiens
APRQR

SEQ ID NO: 2037 - protein, 5 aa, Homo sapiens
SLEGS

SEQ ID NO: 2038 - protein, 5 aa, Homo sapiens
AAQRE

SEQ ID NO: 2039 - protein, 5 aa, Homo sapiens
DSLVD

SEQ ID NO: 2040 - protein, 5 aa, Homo sapiens
KLREE

SEQ ID NO: 2041 - protein, 5 aa, Homo sapiens
KLRAG

SEQ ID NO: 2042 - protein, 5 aa, Homo sapiens
FAWLS

SEQ ID NO: 2043 - protein, 5 aa, Homo sapiens
EDGAS

SEQ ID NO: 2044 - protein, 5 aa, Homo sapiens
NRNQL

SEQ ID NO: 2045 - protein, 5 aa, Homo sapiens
CGCGG

SEQ ID NO: 2046 - protein, 5 aa, Homo sapiens
FSLKE

SEQ ID NO: 2047 - protein, 5 aa, Homo sapiens
PPPAC

SEQ ID NO: 2048 - protein, 5 aa, Homo sapiens
VPAST

SEQ ID NO: 2049 - protein, 5 aa, Homo sapiens
SPRSE

SEQ ID NO: 2050 - protein, 5 aa, Homo sapiens
QWVRP

SEQ ID NO: 2051 - protein, 5 aa, Homo sapiens
FGCPN

SEQ ID NO: 2052 - protein, 5 aa, Homo sapiens
LEPDR

SEQ ID NO: 2053 - protein, 5 aa, Homo sapiens
GAFMV

SEQ ID NO: 2054 - protein, 5 aa, Homo sapiens
SLLAL

SEQ ID NO: 2055 - protein, 5 aa, Homo sapiens
KAKAE

SEQ ID NO: 2056 - protein, 5 aa, Homo sapiens
QWRVV

SEQ ID NO: 2057 - protein, 5 aa, Homo sapiens
KRGSP

SEQ ID NO: 2058 - protein, 5 aa, Homo sapiens
AKGNS

SEQ ID NO: 2059 - protein, 5 aa, Homo sapiens
SSNKV

SEQ ID NO: 2060 - protein, 5 aa, Homo sapiens
EHDGT

SEQ ID NO: 2061 - protein, 5 aa, Homo sapiens
PGTDC

SEQ ID NO: 2062 - protein, 5 aa, Homo sapiens
KCEDA

SEQ ID NO: 2063 - protein, 5 aa, Homo sapiens
GRNLR

SEQ ID NO: 2064 - protein, 5 aa, Homo sapiens
ADKGL

SEQ ID NO: 2065 - protein, 5 aa, Homo sapiens
DDFYD

SEQ ID NO: 2066 - protein, 5 aa, Homo sapiens
VTCAA

SEQ ID NO: 2067 - protein, 5 aa, Homo sapiens
PKRDS

SEQ ID NO: 2068 - protein, 5 aa, Homo sapiens
AAWPR

SEQ ID NO: 2069 - protein, 5 aa, Homo sapiens
EGTSV

SEQ ID NO: 2070 - protein, 5 aa, Homo sapiens
IEDKN

SEQ ID NO: 2071 - protein, 5 aa, Homo sapiens
EGCPV

SEQ ID NO: 2072 - protein, 5 aa, Homo sapiens
YKHMG

SEQ ID NO: 2073 - protein, 5 aa, Homo sapiens
TYAKK

SEQ ID NO: 2074 - protein, 5 aa, Homo sapiens
LQLFP

SEQ ID NO: 2075 - protein, 5 aa, Homo sapiens
RGPRR

SEQ ID NO: 2076 - protein, 5 aa, Homo sapiens
DFFCE

SEQ ID NO: 2077 - protein, 5 aa, Homo sapiens
CACFL

SEQ ID NO: 2078 - protein, 5 aa, Homo sapiens
PAAEG

SEQ ID NO: 2079 - protein, 5 aa, Homo sapiens
AGPAS

SEQ ID NO: 2080 - protein, 5 aa, Homo sapiens
EAEEQ

SEQ ID NO: 2081 - protein, 5 aa, Homo sapiens
QAESF

SEQ ID NO: 2082 - protein, 5 aa, Homo sapiens
SVRSI

SEQ ID NO: 2083 - protein, 5 aa, Homo sapiens
KAKTQ

SEQ ID NO: 2084 - protein, 5 aa, Homo sapiens
FPSSC

SEQ ID NO: 2085 - protein, 5 aa, Homo sapiens
QSPSM

SEQ ID NO: 2086 - protein, 5 aa, Homo sapiens
THFIS

SEQ ID NO: 2087 - protein, 5 aa, Homo sapiens
EPATD

SEQ ID NO: 2088 - protein, 5 aa, Homo sapiens
LILKL

SEQ ID NO: 2089 - protein, 5 aa, Homo sapiens
VQEWV

SEQ ID NO: 2090 - protein, 5 aa, Homo sapiens
IMNNN

SEQ ID NO: 2091 - protein, 5 aa, Homo sapiens
DGALQ

SEQ ID NO: 2092 - protein, 5 aa, Homo sapiens
IGGKG

SEQ ID NO: 2093 - protein, 5 aa, Homo sapiens
HQAFQ

SEQ ID NO: 2094 - protein, 5 aa, Homo sapiens
LLRQN

SEQ ID NO: 2095 - protein, 5 aa, Homo sapiens
MLPAS

SEQ ID NO: 2096 - protein, 5 aa, Homo sapiens
LSTVC

SEQ ID NO: 2097 - protein, 5 aa, Homo sapiens
CNSEL

SEQ ID NO: 2098 - protein, 5 aa, Homo sapiens
EPVGP

SEQ ID NO: 2099 - protein, 5 aa, Homo sapiens
GVCWA

SEQ ID NO: 2100 - protein, 5 aa, Homo sapiens
LTMYS

SEQ ID NO: 2101 - protein, 5 aa, Homo sapiens
ELLFK

SEQ ID NO: 2102 - protein, 5 aa, Homo sapiens
ACAEN

SEQ ID NO: 2103 - protein, 5 aa, Homo sapiens
VIALD

SEQ ID NO: 2104 - protein, 5 aa, Homo sapiens
DFTTE

SEQ ID NO: 2105 - protein, 5 aa, Homo sapiens
MPGRG

SEQ ID NO: 2106 - protein, 5 aa, Homo sapiens
GKSQK

SEQ ID NO: 2107 - protein, 5 aa, Homo sapiens
DVRRP

SEQ ID NO: 2108 - protein, 5 aa, Homo sapiens
TGSRF

SEQ ID NO: 2109 - protein, 5 aa, Homo sapiens
TTFSP

SEQ ID NO: 2110 - protein, 5 aa, Homo sapiens
KSSHS

SEQ ID NO: 2111 - protein, 5 aa, Homo sapiens
RVDAQ

SEQ ID NO: 2112 - protein, 5 aa, Homo sapiens
IFTAD

SEQ ID NO: 2113 - protein, 5 aa, Homo sapiens
NLPLD

SEQ ID NO: 2114 - protein, 5 aa, Homo sapiens
DYRMR

SEQ ID NO: 2115 - protein, 5 aa, Homo sapiens
PCVLL

SEQ ID NO: 2116 - protein, 5 aa, Homo sapiens
LRRPH

SEQ ID NO: 2117 - protein, 5 aa, Homo sapiens
HSRCG

SEQ ID NO: 2118 - protein, 5 aa, Homo sapiens
SAPEQ

SEQ ID NO: 2119 - protein, 5 aa, Homo sapiens
REIQL

SEQ ID NO: 2120 - protein, 5 aa, Homo sapiens
DYSYT

SEQ ID NO: 2121 - protein, 5 aa, Homo sapiens
DEKFE

SEQ ID NO: 2122 - protein, 5 aa, Homo sapiens
VMLQW

SEQ ID NO: 2123 - protein, 5 aa, Homo sapiens
QQYTF

SEQ ID NO: 2124 - protein, 5 aa, Homo sapiens
YLYDN

SEQ ID NO: 2125 - protein, 5 aa, Homo sapiens
TSESG

SEQ ID NO: 2126 - protein, 5 aa, Homo sapiens
KNQLY

SEQ ID NO: 2127 - protein, 5 aa, Homo sapiens
DVGRM

SEQ ID NO: 2128 - protein, 5 aa, Homo sapiens
EVMLK

SEQ ID NO: 2129 - protein, 5 aa, Homo sapiens
ALERH

SEQ ID NO: 2130 - protein, 5 aa, Homo sapiens
RRPYY

SEQ ID NO: 2131 - protein, 5 aa, Homo sapiens
SQGLV

SEQ ID NO: 2132 - protein, 5 aa, Homo sapiens
ECGCR

SEQ ID NO: 2133 - protein, 5 aa, Homo sapiens
HHAEL

SEQ ID NO: 2134 - protein, 5 aa, Homo sapiens
EKEDD

SEQ ID NO: 2135 - protein, 5 aa, Homo sapiens
NVDHS

SEQ ID NO: 2136 - protein, 5 aa, Homo sapiens
TVTSL

SEQ ID NO: 2137 - protein, 5 aa, Homo sapiens
KVKGS

SEQ ID NO: 2138 - protein, 5 aa, Homo sapiens
EEEEL

SEQ ID NO: 2139 - protein, 5 aa, Homo sapiens
TKLNF

SEQ ID NO: 2140 - protein, 5 aa, Homo sapiens
YTGHR

SEQ ID NO: 2141 - protein, 5 aa, Homo sapiens
VDLGS

SEQ ID NO: 2142 - protein, 5 aa, Homo sapiens
GFLLK

SEQ ID NO: 2143 - protein, 5 aa, Homo sapiens
IEEVD

SEQ ID NO: 2144 - protein, 5 aa, Homo sapiens
GFKKA

SEQ ID NO: 2145 - protein, 5 aa, Homo sapiens
FIGIS

SEQ ID NO: 2146 - protein, 5 aa, Homo sapiens
LNSVG

SEQ ID NO: 2147 - protein, 5 aa, Homo sapiens
NKQIG

SEQ ID NO: 2148 - protein, 5 aa, Homo sapiens
VMLAV

SEQ ID NO: 2149 - protein, 5 aa, Homo sapiens
SAPHI

SEQ ID NO: 2150 - protein, 5 aa, Homo sapiens
KPRRE

SEQ ID NO: 2151 - protein, 5 aa, Homo sapiens
DLERS

SEQ ID NO: 2152 - protein, 5 aa, Homo sapiens
SNNSF

SEQ ID NO: 2153 - protein, 5 aa, Homo sapiens
LKSHL

SEQ ID NO: 2154 - protein, 5 aa, Homo sapiens
VPPNA

SEQ ID NO: 2155 - protein, 5 aa, Homo sapiens
KKRSN

SEQ ID NO: 2156 - protein, 5 aa, Homo sapiens
QLLKT

SEQ ID NO: 2157 - protein, 5 aa, Homo sapiens
PEDKK

SEQ ID NO: 2158 - protein, 5 aa, Homo sapiens
DTRAD

SEQ ID NO: 2159 - protein, 5 aa, Homo sapiens
DNQET

SEQ ID NO: 2160 - protein, 5 aa, Homo sapiens
QIGNK

SEQ ID NO: 2161 - protein, 5 aa, Homo sapiens
QAKDI

SEQ ID NO: 2162 - protein, 5 aa, Homo sapiens
PDDED

SEQ ID NO: 2163 - protein, 5 aa, Homo sapiens
GPIFS

SEQ ID NO: 2164 - protein, 5 aa, Homo sapiens
LCFKK

SEQ ID NO: 2165 - protein, 5 aa, Homo sapiens
RCWGP

SEQ ID NO: 2166 - protein, 5 aa, Homo sapiens
THTGE

SEQ ID NO: 2167 - protein, 5 aa, Homo sapiens
SPGNP

SEQ ID NO: 2168 - protein, 5 aa, Homo sapiens
WKRLQ

SEQ ID NO: 2169 - protein, 5 aa, Homo sapiens
ILRTE

SEQ ID NO: 2170 - protein, 5 aa, Homo sapiens
MDWWM

SEQ ID NO: 2171 - protein, 5 aa, Homo sapiens
GSEPL

SEQ ID NO: 2172 - protein, 5 aa, Homo sapiens
HKPWC

SEQ ID NO: 2173 - protein, 5 aa, Homo sapiens
GANSQ

SEQ ID NO: 2174 - protein, 5 aa, Homo sapiens
FRGKQ

SEQ ID NO: 2175 - protein, 5 aa, Homo sapiens
NRYDV

SEQ ID NO: 2176 - protein, 5 aa, Homo sapiens
MKRHM

SEQ ID NO: 2177 - protein, 5 aa, Homo sapiens
TAGLS

SEQ ID NO: 2178 - protein, 5 aa, Homo sapiens
SSLLQ

SEQ ID NO: 2179 - protein, 5 aa, Homo sapiens
DIMEL

SEQ ID NO: 2180 - protein, 5 aa, Homo sapiens
SISFY

SEQ ID NO: 2181 - protein, 5 aa, Homo sapiens
DGSCD

SEQ ID NO: 2182 - protein, 5 aa, Homo sapiens
QVPAY

SEQ ID NO: 2183 - protein, 5 aa, Homo sapiens
ARIIT

SEQ ID NO: 2184 - protein, 5 aa, Homo sapiens
NCKIS

SEQ ID NO: 2185 - protein, 5 aa, Homo sapiens
LCEYS

SEQ ID NO: 2186 - protein, 5 aa, Homo sapiens
KCTIL

SEQ ID NO: 2187 - protein, 5 aa, Homo sapiens
EGGGV

SEQ ID NO: 2188 - protein, 5 aa, Homo sapiens
RENAY

SEQ ID NO: 2189 - protein, 5 aa, Homo sapiens
CFRDE

SEQ ID NO: 2190 - protein, 5 aa, Homo sapiens
TQEAE

SEQ ID NO: 2191 - protein, 5 aa, Homo sapiens
LFTGL

SEQ ID NO: 2192 - protein, 5 aa, Homo sapiens
RVHSP

SEQ ID NO: 2193 - protein, 5 aa, Homo sapiens
LKKQQ

SEQ ID NO: 2194 - protein, 5 aa, Homo sapiens
MASSQ

SEQ ID NO: 2195 - protein, 5 aa, Homo sapiens
MVHVY

SEQ ID NO: 2196 - protein, 5 aa, Homo sapiens
NPFLL

SEQ ID NO: 2197 - protein, 5 aa, Homo sapiens
LSRKD

SEQ ID NO: 2198 - protein, 5 aa, Homo sapiens
DEGEE

SEQ ID NO: 2199 - protein, 5 aa, Homo sapiens
EKGLF

SEQ ID NO: 2200 - protein, 5 aa, Homo sapiens
QRPDR

SEQ ID NO: 2201 - protein, 5 aa, Homo sapiens
WKIKS

SEQ ID NO: 2202 - protein, 5 aa, Homo sapiens
ETAAK

SEQ ID NO: 2203 - protein, 5 aa, Homo sapiens
SCVIS

SEQ ID NO: 2204 - protein, 5 aa, Homo sapiens
KMETS

SEQ ID NO: 2205 - protein, 5 aa, Homo sapiens
GCVIS

SEQ ID NO: 2206 - protein, 5 aa, Homo sapiens
PSEWT

SEQ ID NO: 2207 - protein, 5 aa, Homo sapiens
KHFKP

SEQ ID NO: 2208 - protein, 5 aa, Homo sapiens
KVTLA

SEQ ID NO: 2209 - protein, 5 aa, Homo sapiens
LSRFA

SEQ ID NO: 2210 - protein, 5 aa, Homo sapiens
LESTV

SEQ ID NO: 2211 - protein, 5 aa, Homo sapiens
ISVSE

SEQ ID NO: 2212 - protein, 5 aa, Homo sapiens
RNGPC

SEQ ID NO: 2213 - protein, 5 aa, Homo sapiens
TVTSV

SEQ ID NO: 2214 - protein, 5 aa, Homo sapiens
YYQDA

SEQ ID NO: 2215 - protein, 5 aa, Homo sapiens
SPVPP

SEQ ID NO: 2216 - protein, 5 aa, Homo sapiens
IASKQ

SEQ ID NO: 2217 - protein, 5 aa, Homo sapiens
LGVPI

SEQ ID NO: 2218 - protein, 5 aa, Homo sapiens
EPAGY

SEQ ID NO: 2219 - protein, 5 aa, Homo sapiens
HGALP

SEQ ID NO: 2220 - protein, 5 aa, Homo sapiens
YEVSI

SEQ ID NO: 2221 - protein, 5 aa, Homo sapiens
LAMIR

SEQ ID NO: 2222 - protein, 5 aa, Homo sapiens
GHDEL

SEQ ID NO: 2223 - protein, 5 aa, Homo sapiens
AGEGN

SEQ ID NO: 2224 - protein, 5 aa, Homo sapiens
PGEAK

SEQ ID NO: 2225 - protein, 5 aa, Homo sapiens
IFSES

SEQ ID NO: 2226 - protein, 5 aa, Homo sapiens
SSCPK

SEQ ID NO: 2227 - protein, 5 aa, Homo sapiens
YIGLC

SEQ ID NO: 2228 - protein, 5 aa, Homo sapiens
PGEAK

SEQ ID NO: 2229 - protein, 5 aa, Homo sapiens
DEVKV

SEQ ID NO: 2230 - protein, 5 aa, Homo sapiens
ESKGT

SEQ ID NO: 2231 - protein, 5 aa, Homo sapiens
ARGPE

SEQ ID NO: 2232 - protein, 5 aa, Homo sapiens
KSEKA

SEQ ID NO: 2233 - protein, 5 aa, Homo sapiens
GRHRQ

SEQ ID NO: 2234 - protein, 5 aa, Homo sapiens
EPAGY

SEQ ID NO: 2235 - protein, 5 aa, Homo sapiens
EEMEL

SEQ ID NO: 2236 - protein, 5 aa, Homo sapiens
PGQDQ

SEQ ID NO: 2237 - protein, 5 aa, Homo sapiens
ACSLL

SEQ ID NO: 2238 - protein, 5 aa, Homo sapiens
LAQAF

SEQ ID NO: 2239 - protein, 5 aa, Homo sapiens
GLATT

SEQ ID NO: 2240 - protein, 5 aa, Homo sapiens
QNQGN

SEQ ID NO: 2241 - protein, 5 aa, Homo sapiens
AHFNH

SEQ ID NO: 2242 - protein, 5 aa, Homo sapiens
CWLRD

SEQ ID NO: 2243 - protein, 5 aa, Homo sapiens
LKGKC

SEQ ID NO: 2244 - protein, 5 aa, Homo sapiens
AEDLR

SEQ ID NO: 2245 - protein, 5 aa, Homo sapiens
NSVAH

SEQ ID NO: 2246 - protein, 5 aa, Homo sapiens
LLRRP

SEQ ID NO: 2247 - protein, 5 aa, Homo sapiens
LLQNH

SEQ ID NO: 2248 - protein, 5 aa, Homo sapiens
DCSGQ

SEQ ID NO: 2249 - protein, 5 aa, Homo sapiens
QETQI

SEQ ID NO: 2250 - protein, 5 aa, Homo sapiens
RHDEF

SEQ ID NO: 2251 - protein, 5 aa, Homo sapiens
ADSDF

SEQ ID NO: 2252 - protein, 5 aa, Homo sapiens
QVGPN

SEQ ID NO: 2253 - protein, 5 aa, Homo sapiens
PRLLP

SEQ ID NO: 2254 - protein, 5 aa, Homo sapiens
KLTHL

SEQ ID NO: 2255 - protein, 5 aa, Homo sapiens
KGRLS

SEQ ID NO: 2256 - protein, 5 aa, Homo sapiens
RAKAN

SEQ ID NO: 2257 - protein, 5 aa, Homo sapiens
CPKGD

SEQ ID NO: 2258 - protein, 5 aa, Homo sapiens
NLTFS

SEQ ID NO: 2259 - protein, 5 aa, Homo sapiens
GNPLF

SEQ ID NO: 2260 - protein, 5 aa, Homo sapiens
ECGCR

SEQ ID NO: 2261 - protein, 5 aa, Homo sapiens
ARAPK

SEQ ID NO: 2262 - protein, 5 aa, Homo sapiens
IISLD

SEQ ID NO: 2263 - protein, 5 aa, Homo sapiens
KLIDS

SEQ ID NO: 2264 - protein, 5 aa, Homo sapiens
RSKME

SEQ ID NO: 2265 - protein, 5 aa, Homo sapiens
EADRR

SEQ ID NO: 2266 - protein, 5 aa, Homo sapiens
IATEV

SEQ ID NO: 2267 - protein, 5 aa, Homo sapiens
PQKNS

SEQ ID NO: 2268 - protein, 5 aa, Homo sapiens
NADFH

SEQ ID NO: 2269 - protein, 5 aa, Homo sapiens
QLLEM

SEQ ID NO: 2270 - protein, 5 aa, Homo sapiens
ALALV

SEQ ID NO: 2271 - protein, 5 aa, Homo sapiens
VSSRH

SEQ ID NO: 2272 - protein, 5 aa, Homo sapiens
SKLAG

SEQ ID NO: 2273 - protein, 5 aa, Homo sapiens
FLTSF

SEQ ID NO: 2274 - protein, 5 aa, Homo sapiens
KEETC

SEQ ID NO: 2275 - protein, 5 aa, Homo sapiens
VEILI

SEQ ID NO: 2276 - protein, 5 aa, Homo sapiens
STFSI

SEQ ID NO: 2277 - protein, 5 aa, Homo sapiens
KLSLS

SEQ ID NO: 2278 - protein, 5 aa, Homo sapiens
KKTSI

SEQ ID NO: 2279 - protein, 5 aa, Homo sapiens
IYQVL

SEQ ID NO: 2280 - protein, 5 aa, Homo sapiens
TEDVH

SEQ ID NO: 2281 - protein, 5 aa, Homo sapiens
VYASP

SEQ ID NO: 2282 - protein, 5 aa, Homo sapiens
YSMLQ

SEQ ID NO: 2283 - protein, 5 aa, Homo sapiens
KEPSH

SEQ ID NO: 2284 - protein, 5 aa, Homo sapiens
AYQAL

SEQ ID NO: 2285 - protein, 5 aa, Homo sapiens
LFSED

SEQ ID NO: 2286 - protein, 5 aa, Homo sapiens
RINKT

SEQ ID NO: 2287 - protein, 5 aa, Homo sapiens
PHRPN

SEQ ID NO: 2288 - protein, 5 aa, Homo sapiens
RQNEG

SEQ ID NO: 2289 - protein, 5 aa, Homo sapiens
SEIAN

SEQ ID NO: 2290 - protein, 5 aa, Homo sapiens
VPPLI

SEQ ID NO: 2291 - protein, 5 aa, Homo sapiens
GITLG

SEQ ID NO: 2292 - protein, 5 aa, Homo sapiens
QLRTS

SEQ ID NO: 2293 - protein, 5 aa, Homo sapiens
PHFRK

SEQ ID NO: 2294 - protein, 5 aa, Homo sapiens
CEFPF

SEQ ID NO: 2295 - protein, 5 aa, Homo sapiens
SCQPF

SEQ ID NO: 2296 - protein, 5 aa, Homo sapiens
IKIHR

SEQ ID NO: 2297 - protein, 5 aa, Homo sapiens
EIMEN

SEQ ID NO: 2298 - protein, 5 aa, Homo sapiens
EEPPA

SEQ ID NO: 2299 - protein, 5 aa, Homo sapiens
LHQKT

SEQ ID NO: 2300 - protein, 5 aa, Homo sapiens
ILQAN

SEQ ID NO: 2301 - protein, 5 aa, Homo sapiens
FFASK

SEQ ID NO: 2302 - protein, 5 aa, Homo sapiens
FLQLW

SEQ ID NO: 2303 - protein, 5 aa, Homo sapiens
VLNTS

SEQ ID NO: 2304 - protein, 5 aa, Homo sapiens
LASHS

SEQ ID NO: 2305 - protein, 5 aa, Homo sapiens
GTETV

SEQ ID NO: 2306 - protein, 5 aa, Homo sapiens
GGLRQ

SEQ ID NO: 2307 - protein, 5 aa, Homo sapiens
MNFVG

SEQ ID NO: 2308 - protein, 5 aa, Homo sapiens
KRRQC

SEQ ID NO: 2309 - protein, 5 aa, Homo sapiens
KHCSH

SEQ ID NO: 2310 - protein, 5 aa, Homo sapiens
SLENN

SEQ ID NO: 2311 - protein, 5 aa, Homo sapiens
SCQLL

SEQ ID NO: 2312 - protein, 5 aa, Homo sapiens
RNSGC

SEQ ID NO: 2313 - protein, 5 aa, Homo sapiens
TSILP

SEQ ID NO: 2314 - protein, 5 aa, Homo sapiens
GPGLL

SEQ ID NO: 2315 - protein, 5 aa, Homo sapiens
LVQAL

SEQ ID NO: 2316 - protein, 5 aa, Homo sapiens
GVSRM

SEQ ID NO: 2317 - protein, 5 aa, Homo sapiens
KQSSG

SEQ ID NO: 2318 - protein, 5 aa, Homo sapiens
GVSRM

SEQ ID NO: 2319 - protein, 5 aa, Homo sapiens
TPLSP

SEQ ID NO: 2320 - protein, 5 aa, Homo sapiens
TPLSP

SEQ ID NO: 2321 - protein, 5 aa, Homo sapiens
DSSRY

SEQ ID NO: 2322 - protein, 5 aa, Homo sapiens
KIDEF

SEQ ID NO: 2323 - protein, 5 aa, Homo sapiens
MLKSV

SEQ ID NO: 2324 - protein, 5 aa, Homo sapiens
SYTPE

SEQ ID NO: 2325 - protein, 5 aa, Homo sapiens
VGDHA

SEQ ID NO: 2326 - protein, 5 aa, Homo sapiens
APAGL

SEQ ID NO: 2327 - protein, 5 aa, Homo sapiens
LYAVT

SEQ ID NO: 2328 - protein, 5 aa, Homo sapiens
RGAPS

SEQ ID NO: 2329 - protein, 5 aa, Homo sapiens
PSQRA

SEQ ID NO: 2330 - protein, 5 aa, Homo sapiens
EIVTS

SEQ ID NO: 2331 - protein, 5 aa, Homo sapiens
PQTSE

SEQ ID NO: 2332 - protein, 5 aa, Homo sapiens
AKKFF

SEQ ID NO: 2333 - protein, 5 aa, Homo sapiens
LLYQD

SEQ ID NO: 2334 - protein, 5 aa, Homo sapiens
WVTEV

SEQ ID NO: 2335 - protein, 5 aa, Homo sapiens
ILDIL

SEQ ID NO: 2336 - protein, 5 aa, Homo sapiens
EVTAP

SEQ ID NO: 2337 - protein, 5 aa, Homo sapiens
EEKAE

SEQ ID NO: 2338 - protein, 5 aa, Homo sapiens
RLGIH

SEQ ID NO: 2339 - protein, 5 aa, Homo sapiens
PGSRK

SEQ ID NO: 2340 - protein, 5 aa, Homo sapiens
DLLDI

SEQ ID NO: 2341 - protein, 5 aa, Homo sapiens
LQTRT

SEQ ID NO: 2342 - protein, 5 aa, Homo sapiens
RRSAA

SEQ ID NO: 2343 - protein, 5 aa, Homo sapiens
EDEWD

SEQ ID NO: 2344 - protein, 5 aa, Homo sapiens
SLVSR

SEQ ID NO: 2345 - protein, 5 aa, Homo sapiens
ERFLI

SEQ ID NO: 2346 - protein, 5 aa, Homo sapiens
SSTSN

SEQ ID NO: 2347 - protein, 5 aa, Homo sapiens
RKETG

SEQ ID NO: 2348 - protein, 5 aa, Homo sapiens
GKLTH

SEQ ID NO: 2349 - protein, 5 aa, Homo sapiens
TSMSL

SEQ ID NO: 2350 - protein, 5 aa, Homo sapiens
GRKAI

SEQ ID NO: 2351 - protein, 5 aa, Homo sapiens
FLNDM

SEQ ID NO: 2352 - protein, 5 aa, Homo sapiens
LLNPT

SEQ ID NO: 2353 - protein, 5 aa, Homo sapiens
LSSNL

SEQ ID NO: 2354 - protein, 5 aa, Homo sapiens
TRPAK

SEQ ID NO: 2355 - protein, 5 aa, Homo sapiens
ILELT

SEQ ID NO: 2356 - protein, 5 aa, Homo sapiens
DLLET

SEQ ID NO: 2357 - protein, 5 aa, Homo sapiens
TEQVT

SEQ ID NO: 2358 - protein, 5 aa, Homo sapiens
SVSGI

SEQ ID NO: 2359 - protein, 5 aa, Homo sapiens
DCGLF

SEQ ID NO: 2360 - protein, 5 aa, Homo sapiens
LSLNF

SEQ ID NO: 2361 - protein, 5 aa, Homo sapiens
HTTAT

SEQ ID NO: 2362 - protein, 5 aa, Homo sapiens
SQRSL

SEQ ID NO: 2363 - protein, 5 aa, Homo sapiens
DAAGR

SEQ ID NO: 2364 - protein, 5 aa, Homo sapiens
SKAGE

SEQ ID NO: 2365 - protein, 5 aa, Homo sapiens
GTQEQ

SEQ ID NO: 2366 - protein, 5 aa, Homo sapiens
GTQEQ

SEQ ID NO: 2367 - protein, 5 aa, Homo sapiens
APPGP

SEQ ID NO: 2368 - protein, 5 aa, Homo sapiens
PAVAT

SEQ ID NO: 2369 - protein, 5 aa, Homo sapiens
NEDLS

SEQ ID NO: 2370 - protein, 5 aa, Homo sapiens
KFVYL

SEQ ID NO: 2371 - protein, 5 aa, Homo sapiens
PQAMT

SEQ ID NO: 2372 - protein, 5 aa, Homo sapiens
NSVTI

SEQ ID NO: 2373 - protein, 5 aa, Homo sapiens
IEKRE

SEQ ID NO: 2374 - protein, 5 aa, Homo sapiens
MLGKF

SEQ ID NO: 2375 - protein, 5 aa, Homo sapiens
TSKYR

SEQ ID NO: 2376 - protein, 5 aa, Homo sapiens
YIKKT

SEQ ID NO: 2377 - protein, 5 aa, Homo sapiens
TVEFS

SEQ ID NO: 2378 - protein, 5 aa, Homo sapiens
KTENN

SEQ ID NO: 2379 - protein, 5 aa, Homo sapiens
DLSLD

SEQ ID NO: 2380 - protein, 5 aa, Homo sapiens
IEELM

SEQ ID NO: 2381 - protein, 5 aa, Homo sapiens
KGCCN

SEQ ID NO: 2382 - protein, 5 aa, Homo sapiens
ANIPL

SEQ ID NO: 2383 - protein, 5 aa, Homo sapiens
MSLDS

SEQ ID NO: 2384 - protein, 5 aa, Homo sapiens
YDIIV

SEQ ID NO: 2385 - protein, 5 aa, Homo sapiens
VGSFR

SEQ ID NO: 2386 - protein, 5 aa, Homo sapiens
HGKFL

SEQ ID NO: 2387 - protein, 5 aa, Homo sapiens
VLKET

SEQ ID NO: 2388 - protein, 5 aa, Homo sapiens
CFSKM

SEQ ID NO: 2389 - protein, 5 aa, Homo sapiens
RVWLE

SEQ ID NO: 2390 - protein, 5 aa, Homo sapiens
TLMEI

SEQ ID NO: 2391 - protein, 5 aa, Homo sapiens
RQYEL

SEQ ID NO: 2392 - protein, 5 aa, Homo sapiens
LDADF

SEQ ID NO: 2393 - protein, 5 aa, Homo sapiens
SSAVV

SEQ ID NO: 2394 - protein, 5 aa, Homo sapiens
HLTRL

SEQ ID NO: 2395 - protein, 5 aa, Homo sapiens
RLPVF

SEQ ID NO: 2396 - protein, 5 aa, Homo sapiens
GGKPL

SEQ ID NO: 2397 - protein, 5 aa, Homo sapiens
SPCLL

SEQ ID NO: 2398 - protein, 5 aa, Homo sapiens
EGKYS

SEQ ID NO: 2399 - protein, 5 aa, Homo sapiens
LNYIC

SEQ ID NO: 2400 - protein, 5 aa, Homo sapiens
EGDES

SEQ ID NO: 2401 - protein, 5 aa, Homo sapiens
LSDLY

SEQ ID NO: 2402 - protein, 5 aa, Homo sapiens
SSSEA

SEQ ID NO: 2403 - protein, 5 aa, Homo sapiens
KVQDP

SEQ ID NO: 2404 - protein, 5 aa, Homo sapiens
DFTEE

SEQ ID NO: 2405 - protein, 5 aa, Homo sapiens
FELKP

SEQ ID NO: 2406 - protein, 5 aa, Homo sapiens
TAGES

SEQ ID NO: 2407 - protein, 5 aa, Homo sapiens
SPPFH

SEQ ID NO: 2408 - protein, 5 aa, Homo sapiens
KKEKK

SEQ ID NO: 2409 - protein, 5 aa, Homo sapiens
LSGKA

SEQ ID NO: 2410 - protein, 5 aa, Homo sapiens
KEQLE

SEQ ID NO: 2411 - protein, 5 aa, Homo sapiens
FKIKL

SEQ ID NO: 2412 - protein, 5 aa, Homo sapiens
SLNWS

SEQ ID NO: 2413 - protein, 5 aa, Homo sapiens
TFPSS

SEQ ID NO: 2414 - protein, 5 aa, Homo sapiens
ASDFF

SEQ ID NO: 2415 - protein, 5 aa, Homo sapiens
QKIEE

SEQ ID NO: 2416 - protein, 5 aa, Homo sapiens
KISAE

SEQ ID NO: 2417 - protein, 5 aa, Homo sapiens
ENLLM

SEQ ID NO: 2418 - protein, 5 aa, Homo sapiens
VAELV

SEQ ID NO: 2419 - protein, 5 aa, Homo sapiens
NILSQ

SEQ ID NO: 2420 - protein, 5 aa, Homo sapiens
STEGT

SEQ ID NO: 2421 - protein, 5 aa, Homo sapiens
KSFKS

SEQ ID NO: 2422 - protein, 5 aa, Homo sapiens
SGVTR

SEQ ID NO: 2423 - protein, 5 aa, Homo sapiens
KSYTH

SEQ ID NO: 2424 - protein, 5 aa, Homo sapiens
KSYKH

SEQ ID NO: 2425 - protein, 5 aa, Homo sapiens
KSYKH

SEQ ID NO: 2426 - protein, 5 aa, Homo sapiens
NQNSS

SEQ ID NO: 2427 - protein, 5 aa, Homo sapiens
LVTKG

SEQ ID NO: 2428 - protein, 5 aa, Homo sapiens
NSKEG

SEQ ID NO: 2429 - protein, 5 aa, Homo sapiens
QTNSQ

SEQ ID NO: 2430 - protein, 5 aa, Homo sapiens
RETDL

SEQ ID NO: 2431 - protein, 5 aa, Homo sapiens
SEGPV

SEQ ID NO: 2432 - protein, 5 aa, Homo sapiens
RRKQH

SEQ ID NO: 2433 - protein, 5 aa, Homo sapiens
LLTSS

SEQ ID NO: 2434 - protein, 5 aa, Homo sapiens
LTREE

SEQ ID NO: 2435 - protein, 5 aa, Homo sapiens
EDDVA

SEQ ID NO: 2436 - protein, 5 aa, Homo sapiens
EAANQ

SEQ ID NO: 2437 - protein, 5 aa, Homo sapiens
AALPA

SEQ ID NO: 2438 - protein, 5 aa, Homo sapiens
DHDEL

SEQ ID NO: 2439 - protein, 5 aa, Homo sapiens
YYNSA

SEQ ID NO: 2440 - protein, 5 aa, Homo sapiens
RETLY

SEQ ID NO: 2441 - protein, 5 aa, Homo sapiens
PRAQR

SEQ ID NO: 2442 - protein, 5 aa, Homo sapiens
RAMYV

SEQ ID NO: 2443 - protein, 5 aa, Homo sapiens
PSDNH

SEQ ID NO: 2444 - protein, 5 aa, Homo sapiens
GLTIG

SEQ ID NO: 2445 - protein, 5 aa, Homo sapiens
DKDQG

SEQ ID NO: 2446 - protein, 5 aa, Homo sapiens
LKGEE

SEQ ID NO: 2447 - protein, 5 aa, Homo sapiens
LKIDS

SEQ ID NO: 2448 - protein, 5 aa, Homo sapiens
FKANP

SEQ ID NO: 2449 - protein, 5 aa, Homo sapiens
ITLPE

SEQ ID NO: 2450 - protein, 5 aa, Homo sapiens
DEEED

SEQ ID NO: 2451 - protein, 5 aa, Homo sapiens
NDMMS

SEQ ID NO: 2452 - protein, 5 aa, Homo sapiens
VQTSF

SEQ ID NO: 2453 - protein, 5 aa, Homo sapiens
FASLF

SEQ ID NO: 2454 - protein, 5 aa, Homo sapiens
KKKKK

SEQ ID NO: 2455 - protein, 5 aa, Homo sapiens
FTRRY

SEQ ID NO: 2456 - protein, 5 aa, Homo sapiens
AAKKD

SEQ ID NO: 2457 - protein, 5 aa, Homo sapiens
EGNFC

SEQ ID NO: 2458 - protein, 5 aa, Homo sapiens
FMWYT

SEQ ID NO: 2459 - protein, 5 aa, Homo sapiens
APSSG

SEQ ID NO: 2460 - protein, 5 aa, Homo sapiens
SALLQ

SEQ ID NO: 2461 - protein, 5 aa, Homo sapiens
GAFAL

SEQ ID NO: 2462 - protein, 5 aa, Homo sapiens
GDTFL

SEQ ID NO: 2463 - protein, 5 aa, Homo sapiens
ARDEL

SEQ ID NO: 2464 - protein, 5 aa, Homo sapiens
KSLSH

SEQ ID NO: 2465 - protein, 5 aa, Homo sapiens
KHSTL

SEQ ID NO: 2466 - protein, 5 aa, Homo sapiens
QQQDA

SEQ ID NO: 2467 - protein, 5 aa, Homo sapiens
RFPVM

SEQ ID NO: 2468 - protein, 5 aa, Homo sapiens
EEELS

SEQ ID NO: 2469 - protein, 5 aa, Homo sapiens
VETVV

SEQ ID NO: 2470 - protein, 5 aa, Homo sapiens
DHMYH

SEQ ID NO: 2471 - protein, 5 aa, Homo sapiens
EAVAT

SEQ ID NO: 2472 - protein, 5 aa, Homo sapiens
AAWFT

SEQ ID NO: 2473 - protein, 5 aa, Homo sapiens
SCTCR

SEQ ID NO: 2474 - protein, 5 aa, Homo sapiens
GESDL

SEQ ID NO: 2475 - protein, 5 aa, Homo sapiens
TKENS

SEQ ID NO: 2476 - protein, 5 aa, Homo sapiens
RTGDR

SEQ ID NO: 2477 - protein, 5 aa, Homo sapiens
DLKIK

SEQ ID NO: 2478 - protein, 5 aa, Homo sapiens
GHRAT

SEQ ID NO: 2479 - protein, 5 aa, Homo sapiens
RERFG

SEQ ID NO: 2480 - protein, 5 aa, Homo sapiens
AAPAP

SEQ ID NO: 2481 - protein, 5 aa, Homo sapiens
RSVLS

SEQ ID NO: 2482 - protein, 5 aa, Homo sapiens
FQECG

SEQ ID NO: 2483 - protein, 5 aa, Homo sapiens
PGLLG

SEQ ID NO: 2484 - protein, 5 aa, Homo sapiens
AEEKP

SEQ ID NO: 2485 - protein, 5 aa, Homo sapiens
DCHCI

SEQ ID NO: 2486 - protein, 5 aa, Homo sapiens
QAGKQ

SEQ ID NO: 2487 - protein, 5 aa, Homo sapiens
QVPAY

SEQ ID NO: 2488 - protein, 5 aa, Homo sapiens
ETPEP

SEQ ID NO: 2489 - protein, 5 aa, Homo sapiens
SSNII

SEQ ID NO: 2490 - protein, 5 aa, Homo sapiens
HNRQM

SEQ ID NO: 2491 - protein, 5 aa, Homo sapiens
NDVDE

SEQ ID NO: 2492 - protein, 5 aa, Homo sapiens
PTMPS

SEQ ID NO: 2493 - protein, 5 aa, Homo sapiens
FEIEL

SEQ ID NO: 2494 - protein, 5 aa, Homo sapiens
FESES

SEQ ID NO: 2495 - protein, 5 aa, Homo sapiens
QVRWT

SEQ ID NO: 2496 - protein, 5 aa, Homo sapiens
CLVAR

SEQ ID NO: 2497 - protein, 5 aa, Homo sapiens
DTPKP

SEQ ID NO: 2498 - protein, 5 aa, Homo sapiens
AVTAQ

SEQ ID NO: 2499 - protein, 5 aa, Homo sapiens
PPPAQ

SEQ ID NO: 2500 - protein, 5 aa, Homo sapiens
VIPRS

SEQ ID NO: 2501 - protein, 5 aa, Homo sapiens
TEKYR

SEQ ID NO: 2502 - protein, 5 aa, Homo sapiens
QPAPQ

SEQ ID NO: 2503 - protein, 5 aa, Homo sapiens
GEASS

SEQ ID NO: 2504 - protein, 5 aa, Homo sapiens
PGLSS

SEQ ID NO: 2505 - protein, 5 aa, Homo sapiens
NCVTQ

SEQ ID NO: 2506 - protein, 5 aa, Homo sapiens
KAFLK

SEQ ID NO: 2507 - protein, 5 aa, Homo sapiens
ALALA

SEQ ID NO: 2508 - protein, 5 aa, Homo sapiens
PWEET

SEQ ID NO: 2509 - protein, 5 aa, Homo sapiens
GCPAA

SEQ ID NO: 2510 - protein, 5 aa, Homo sapiens
GTGRV

SEQ ID NO: 2511 - protein, 5 aa, Homo sapiens
DMSLD

SEQ ID NO: 2512 - protein, 5 aa, Homo sapiens
KVTAK

SEQ ID NO: 2513 - protein, 5 aa, Homo sapiens
PAMVL

SEQ ID NO: 2514 - protein, 5 aa, Homo sapiens
ERCLK

SEQ ID NO: 2515 - protein, 5 aa, Homo sapiens
PGDGP

SEQ ID NO: 2516 - protein, 5 aa, Homo sapiens
SLAPS

SEQ ID NO: 2517 - protein, 5 aa, Homo sapiens
TVDDD

SEQ ID NO: 2518 - protein, 5 aa, Homo sapiens
RPPPE

SEQ ID NO: 2519 - protein, 5 aa, Homo sapiens
SPFCQ

SEQ ID NO: 2520 - protein, 5 aa, Homo sapiens
PRKGD

SEQ ID NO: 2521 - protein, 5 aa, Homo sapiens
LSFFR

SEQ ID NO: 2522 - protein, 5 aa, Homo sapiens
AHGSH

SEQ ID NO: 2523 - protein, 5 aa, Homo sapiens
TRYMT

SEQ ID NO: 2524 - protein, 5 aa, Homo sapiens
TFVSY

SEQ ID NO: 2525 - protein, 5 aa, Homo sapiens
QLVNY

SEQ ID NO: 2526 - protein, 5 aa, Homo sapiens
TPYHC

SEQ ID NO: 2527 - protein, 5 aa, Homo sapiens
KPSTN

SEQ ID NO: 2528 - protein, 5 aa, Homo sapiens
RPLKL

SEQ ID NO: 2529 - protein, 5 aa, Homo sapiens
GGPRE

SEQ ID NO: 2530 - protein, 5 aa, Homo sapiens
HEQIH

SEQ ID NO: 2531 - protein, 5 aa, Homo sapiens
RIHNS

SEQ ID NO: 2532 - protein, 5 aa, Homo sapiens
LTHVF

SEQ ID NO: 2533 - protein, 5 aa, Homo sapiens
PSKPQ

SEQ ID NO: 2534 - protein, 5 aa, Homo sapiens
ALLVC

SEQ ID NO: 2535 - protein, 5 aa, Homo sapiens
SKKVH

SEQ ID NO: 2536 - protein, 5 aa, Homo sapiens
RTISV

SEQ ID NO: 2537 - protein, 5 aa, Homo sapiens
VLELF

SEQ ID NO: 2538 - protein, 5 aa, Homo sapiens
VYLVV

SEQ ID NO: 2539 - protein, 5 aa, Homo sapiens
RHCSQ

SEQ ID NO: 2540 - protein, 5 aa, Homo sapiens
LDLKS

SEQ ID NO: 2541 - protein, 5 aa, Homo sapiens
YSYAG

SEQ ID NO: 2542 - protein, 5 aa, Homo sapiens
PLGID

SEQ ID NO: 2543 - protein, 5 aa, Homo sapiens
TFTPL

SEQ ID NO: 2544 - protein, 5 aa, Homo sapiens
TFTPL

SEQ ID NO: 2545 - protein, 5 aa, Homo sapiens
KSKYR

SEQ ID NO: 2546 - protein, 5 aa, Homo sapiens
ELTES

SEQ ID NO: 2547 - protein, 5 aa, Homo sapiens
ILPGI

SEQ ID NO: 2548 - protein, 5 aa, Homo sapiens
DLVYV

SEQ ID NO: 2549 - protein, 5 aa, Homo sapiens
SPVSQ

SEQ ID NO: 2550 - protein, 5 aa, Homo sapiens
LQTLI

SEQ ID NO: 2551 - protein, 5 aa, Homo sapiens
VPSRR

SEQ ID NO: 2552 - protein, 5 aa, Homo sapiens
PGKRN

SEQ ID NO: 2553 - protein, 5 aa, Homo sapiens
VHHSS

SEQ ID NO: 2554 - protein, 5 aa, Homo sapiens
CLTIQ

SEQ ID NO: 2555 - protein, 5 aa, Homo sapiens
EVPSP

SEQ ID NO: 2556 - protein, 5 aa, Homo sapiens
TPFKK

SEQ ID NO: 2557 - protein, 5 aa, Homo sapiens
IIYSD

SEQ ID NO: 2558 - protein, 5 aa, Homo sapiens
HKDVM

SEQ ID NO: 2559 - protein, 5 aa, Homo sapiens
DAGEK

SEQ ID NO: 2560 - protein, 5 aa, Homo sapiens
RKFLD

SEQ ID NO: 2561 - protein, 5 aa, Homo sapiens
FIHFS

SEQ ID NO: 2562 - protein, 5 aa, Homo sapiens
NEWKK

SEQ ID NO: 2563 - protein, 5 aa, Homo sapiens
VLHLC

SEQ ID NO: 2564 - protein, 5 aa, Homo sapiens
KGYPR

SEQ ID NO: 2565 - protein, 5 aa, Homo sapiens
CPSAS

SEQ ID NO: 2566 - protein, 5 aa, Homo sapiens
QSQDF

SEQ ID NO: 2567 - protein, 5 aa, Homo sapiens
TTSRG

SEQ ID NO: 2568 - protein, 5 aa, Homo sapiens
RPAWP

SEQ ID NO: 2569 - protein, 5 aa, Homo sapiens
AKQQA

SEQ ID NO: 2570 - protein, 5 aa, Homo sapiens
IFNIF

SEQ ID NO: 2571 - protein, 5 aa, Homo sapiens
EHTVS

SEQ ID NO: 2572 - protein, 5 aa, Homo sapiens
LLKEG

SEQ ID NO: 2573 - protein, 5 aa, Homo sapiens
RESVV

SEQ ID NO: 2574 - protein, 5 aa, Homo sapiens
GNCSC

SEQ ID NO: 2575 - protein, 5 aa, Homo sapiens
GRDLS

SEQ ID NO: 2576 - protein, 5 aa, Homo sapiens
VKRKY

SEQ ID NO: 2577 - protein, 5 aa, Homo sapiens
APGYC

SEQ ID NO: 2578 - protein, 5 aa, Homo sapiens
ADAQD

SEQ ID NO: 2579 - protein, 5 aa, Homo sapiens
SPLDI

SEQ ID NO: 2580 - protein, 5 aa, Homo sapiens
ITQLQ

SEQ ID NO: 2581 - protein, 5 aa, Homo sapiens
QASKK

SEQ ID NO: 2582 - protein, 5 aa, Homo sapiens
KGGTD

SEQ ID NO: 2583 - protein, 5 aa, Homo sapiens
TPDCR

SEQ ID NO: 2584 - protein, 5 aa, Homo sapiens
AQFPG

SEQ ID NO: 2585 - protein, 5 aa, Homo sapiens
PIFPL

SEQ ID NO: 2586 - protein, 5 aa, Homo sapiens
WDVHE

SEQ ID NO: 2587 - protein, 5 aa, Homo sapiens
KVELV

SEQ ID NO: 2588 - protein, 5 aa, Homo sapiens
SVTVE

SEQ ID NO: 2589 - protein, 5 aa, Homo sapiens
QKLRF

SEQ ID NO: 2590 - protein, 5 aa, Homo sapiens
TLPDP

SEQ ID NO: 2591 - protein, 5 aa, Homo sapiens
EHMSM

SEQ ID NO: 2592 - protein, 5 aa, Homo sapiens
GVKFF

SEQ ID NO: 2593 - protein, 5 aa, Homo sapiens
SEAQA

SEQ ID NO: 2594 - protein, 5 aa, Homo sapiens
SYHGF

SEQ ID NO: 2595 - protein, 5 aa, Homo sapiens
HKKSL

SEQ ID NO: 2596 - protein, 5 aa, Homo sapiens
SDCIM

SEQ ID NO: 2597 - protein, 5 aa, Homo sapiens
VGRAS

SEQ ID NO: 2598 - protein, 5 aa, Homo sapiens
SNLLQ

SEQ ID NO: 2599 - protein, 5 aa, Homo sapiens
VLFIY

SEQ ID NO: 2600 - protein, 5 aa, Homo sapiens
QKYAM

SEQ ID NO: 2601 - protein, 5 aa, Homo sapiens
GTAEE

SEQ ID NO: 2602 - protein, 5 aa, Homo sapiens
KITTV

SEQ ID NO: 2603 - protein, 5 aa, Homo sapiens
RTYSC

SEQ ID NO: 2604 - protein, 5 aa, Homo sapiens
DGESQ

SEQ ID NO: 2605 - protein, 5 aa, Homo sapiens
VESPC

SEQ ID NO: 2606 - protein, 5 aa, Homo sapiens
RSRED

SEQ ID NO: 2607 - protein, 5 aa, Homo sapiens
RKNVS

SEQ ID NO: 2608 - protein, 5 aa, Homo sapiens
QFGKK

SEQ ID NO: 2609 - protein, 5 aa, Homo sapiens
KVVNF

SEQ ID NO: 2610 - protein, 5 aa, Homo sapiens
HKREI

SEQ ID NO: 2611 - protein, 5 aa, Homo sapiens
DAERM

SEQ ID NO: 2612 - protein, 5 aa, Homo sapiens
QPSCC

SEQ ID NO: 2613 - protein, 5 aa, Homo sapiens
IIAYF

SEQ ID NO: 2614 - protein, 5 aa, Homo sapiens
LYKPI

SEQ ID NO: 2615 - protein, 5 aa, Homo sapiens
RERPY

SEQ ID NO: 2616 - protein, 5 aa, Homo sapiens
EPGPS

SEQ ID NO: 2617 - protein, 5 aa, Homo sapiens
GEMKE

SEQ ID NO: 2618 - protein, 5 aa, Homo sapiens
EATSQ

SEQ ID NO: 2619 - protein, 5 aa, Homo sapiens
KKIHT

SEQ ID NO: 2620 - protein, 5 aa, Homo sapiens
LYRPA

SEQ ID NO: 2621 - protein, 5 aa, Homo sapiens
RHHEC

SEQ ID NO: 2622 - protein, 5 aa, Homo sapiens
SVRTA

SEQ ID NO: 2623 - protein, 5 aa, Homo sapiens
VTNGS

SEQ ID NO: 2624 - protein, 5 aa, Homo sapiens
MLLLR

SEQ ID NO: 2625 - protein, 5 aa, Homo sapiens
PEAQN

SEQ ID NO: 2626 - protein, 5 aa, Homo sapiens
GLGLN

SEQ ID NO: 2627 - protein, 5 aa, Homo sapiens
VEVPA

SEQ ID NO: 2628 - protein, 5 aa, Homo sapiens
DSSWY

SEQ ID NO: 2629 - protein, 5 aa, Homo sapiens
FTQPR

SEQ ID NO: 2630 - protein, 5 aa, Homo sapiens
CIYFV

SEQ ID NO: 2631 - protein, 5 aa, Homo sapiens
ILRIM

SEQ ID NO: 2632 - protein, 5 aa, Homo sapiens
FSTEK

SEQ ID NO: 2633 - protein, 5 aa, Homo sapiens
TLIRS

SEQ ID NO: 2634 - protein, 5 aa, Homo sapiens
SYTMI

SEQ ID NO: 2635 - protein, 5 aa, Homo sapiens
ATSSF

SEQ ID NO: 2636 - protein, 5 aa, Homo sapiens
ILVSW

SEQ ID NO: 2637 - protein, 5 aa, Homo sapiens
GKAFS

SEQ ID NO: 2638 - protein, 5 aa, Homo sapiens
QVLPI

SEQ ID NO: 2639 - protein, 5 aa, Homo sapiens
RERFG

SEQ ID NO: 2640 - protein, 5 aa, Homo sapiens
ALPSS

SEQ ID NO: 2641 - protein, 5 aa, Homo sapiens
PWREL

SEQ ID NO: 2642 - protein, 5 aa, Homo sapiens
TWIVL

SEQ ID NO: 2643 - protein, 5 aa, Homo sapiens
EEFYA

SEQ ID NO: 2644 - protein, 5 aa, Homo sapiens
GQIHR

SEQ ID NO: 2645 - protein, 5 aa, Homo sapiens
GSTDY

SEQ ID NO: 2646 - protein, 5 aa, Homo sapiens
HRFMV

SEQ ID NO: 2647 - protein, 5 aa, Homo sapiens
RSWRP

SEQ ID NO: 2648 - protein, 5 aa, Homo sapiens
EAAVW

SEQ ID NO: 2649 - protein, 5 aa, Homo sapiens
EESWV

SEQ ID NO: 2650 - protein, 5 aa, Homo sapiens
ASAAP

SEQ ID NO: 2651 - protein, 5 aa, Homo sapiens
KETHF

SEQ ID NO: 2652 - protein, 5 aa, Homo sapiens
AYASH

SEQ ID NO: 2653 - protein, 5 aa, Homo sapiens
SGSCL

SEQ ID NO: 2654 - protein, 5 aa, Homo sapiens
FLSHL

SEQ ID NO: 2655 - protein, 5 aa, Homo sapiens
GDAEG

SEQ ID NO: 2656 - protein, 5 aa, Homo sapiens
WLEEQ

SEQ ID NO: 2657 - protein, 5 aa, Homo sapiens
LYKRR

SEQ ID NO: 2658 - protein, 5 aa, Homo sapiens
SPSGS

SEQ ID NO: 2659 - protein, 5 aa, Homo sapiens
DLCVY

SEQ ID NO: 2660 - protein, 5 aa, Homo sapiens
TSEGK

SEQ ID NO: 2661 - protein, 5 aa, Homo sapiens
QVQPE

SEQ ID NO: 2662 - protein, 5 aa, Homo sapiens
VRIGH

SEQ ID NO: 2663 - protein, 5 aa, Homo sapiens
IEEQT

SEQ ID NO: 2664 - protein, 5 aa, Homo sapiens
TEGIV

SEQ ID NO: 2665 - protein, 5 aa, Homo sapiens
LEDQA

SEQ ID NO: 2666 - protein, 5 aa, Homo sapiens
YANFK

SEQ ID NO: 2667 - protein, 5 aa, Homo sapiens
RGGKH

SEQ ID NO: 2668 - protein, 5 aa, Homo sapiens
SGAGH

SEQ ID NO: 2669 - protein, 5 aa, Homo sapiens
AQPQI

SEQ ID NO: 2670 - protein, 5 aa, Homo sapiens
RSALM

SEQ ID NO: 2671 - protein, 5 aa, Homo sapiens
DPRGP

SEQ ID NO: 2672 - protein, 5 aa, Homo sapiens
MVQSP

SEQ ID NO: 2673 - protein, 5 aa, Homo sapiens
EKLKK

SEQ ID NO: 2674 - protein, 5 aa, Homo sapiens
RYCDK

SEQ ID NO: 2675 - protein, 5 aa, Homo sapiens
SSKRD

SEQ ID NO: 2676 - protein, 5 aa, Homo sapiens
SQKHT

SEQ ID NO: 2677 - protein, 5 aa, Homo sapiens
CPKGK

SEQ ID NO: 2678 - protein, 5 aa, Homo sapiens
LLLQA

SEQ ID NO: 2679 - protein, 5 aa, Homo sapiens
ACYPD

SEQ ID NO: 2680 - protein, 5 aa, Homo sapiens
SIKLK

SEQ ID NO: 2681 - protein, 5 aa, Homo sapiens
DKKTQ

SEQ ID NO: 2682 - protein, 5 aa, Homo sapiens
RGERA

SEQ ID NO: 2683 - protein, 5 aa, Homo sapiens
VLKRR

SEQ ID NO: 2684 - protein, 5 aa, Homo sapiens
SRKTI

SEQ ID NO: 2685 - protein, 5 aa, Homo sapiens
ASTSR

SEQ ID NO: 2686 - protein, 5 aa, Homo sapiens
DPCGP

SEQ ID NO: 2687 - protein, 5 aa, Homo sapiens
PGQFS

SEQ ID NO: 2688 - protein, 5 aa, Homo sapiens
KRFHF

SEQ ID NO: 2689 - protein, 5 aa, Homo sapiens
SQESH

SEQ ID NO: 2690 - protein, 5 aa, Homo sapiens
TTASL

SEQ ID NO: 2691 - protein, 5 aa, Homo sapiens
RLRYR

SEQ ID NO: 2692 - protein, 5 aa, Homo sapiens
GKPVF

SEQ ID NO: 2693 - protein, 5 aa, Homo sapiens
AAASV

SEQ ID NO: 2694 - protein, 5 aa, Homo sapiens
VKLLK

SEQ ID NO: 2695 - protein, 5 aa, Homo sapiens
EETLT

SEQ ID NO: 2696 - protein, 5 aa, Homo sapiens
RLGMN

SEQ ID NO: 2697 - protein, 5 aa, Homo sapiens
FGQES

SEQ ID NO: 2698 - protein, 5 aa, Homo sapiens
MEYIV

SEQ ID NO: 2699 - protein, 5 aa, Homo sapiens
MLGSG

SEQ ID NO: 2700 - protein, 5 aa, Homo sapiens
QDWAS

SEQ ID NO: 2701 - protein, 5 aa, Homo sapiens
DLTTS

SEQ ID NO: 2702 - protein, 5 aa, Homo sapiens
RTTTF

SEQ ID NO: 2703 - protein, 5 aa, Homo sapiens
PQLWP

SEQ ID NO: 2704 - protein, 5 aa, Homo sapiens
CYAEN

SEQ ID NO: 2705 - protein, 5 aa, Homo sapiens
PLVWV

SEQ ID NO: 2706 - protein, 5 aa, Homo sapiens
KERGT

SEQ ID NO: 2707 - protein, 5 aa, Homo sapiens
PSPAS

SEQ ID NO: 2708 - protein, 5 aa, Homo sapiens
SCTLL

SEQ ID NO: 2709 - protein, 5 aa, Homo sapiens
GLKME

SEQ ID NO: 2710 - protein, 5 aa, Homo sapiens
DEGSG

SEQ ID NO: 2711 - protein, 5 aa, Homo sapiens
LANQK

SEQ ID NO: 2712 - protein, 5 aa, Homo sapiens
AVMHY

SEQ ID NO: 2713 - protein, 5 aa, Homo sapiens
EMMYT

SEQ ID NO: 2714 - protein, 5 aa, Homo sapiens
SRDFS

SEQ ID NO: 2715 - protein, 5 aa, Homo sapiens
YISVP

SEQ ID NO: 2716 - protein, 5 aa, Homo sapiens
GKDKT

SEQ ID NO: 2717 - protein, 5 aa, Homo sapiens
SKPDF

SEQ ID NO: 2718 - protein, 5 aa, Homo sapiens
VLSQG

SEQ ID NO: 2719 - protein, 5 aa, Homo sapiens
TKVLL

SEQ ID NO: 2720 - protein, 5 aa, Homo sapiens
VLCDG

SEQ ID NO: 2721 - protein, 5 aa, Homo sapiens
AYDVS

SEQ ID NO: 2722 - protein, 5 aa, Homo sapiens
HFNKT

SEQ ID NO: 2723 - protein, 5 aa, Homo sapiens
GPLLP

SEQ ID NO: 2724 - protein, 5 aa, Homo sapiens
SCCIQ

SEQ ID NO: 2725 - protein, 5 aa, Homo sapiens
STTPR

SEQ ID NO: 2726 - protein, 5 aa, Homo sapiens
LFENY

SEQ ID NO: 2727 - protein, 5 aa, Homo sapiens
LLCVK

SEQ ID NO: 2728 - protein, 5 aa, Homo sapiens
PEQAL

SEQ ID NO: 2729 - protein, 5 aa, Homo sapiens
VISEE

SEQ ID NO: 2730 - protein, 5 aa, Homo sapiens
SHKRS

SEQ ID NO: 2731 - protein, 5 aa, Homo sapiens
YRKKS

SEQ ID NO: 2732 - protein, 5 aa, Homo sapiens
NPRPL

SEQ ID NO: 2733 - protein, 5 aa, Homo sapiens
ALAAT

SEQ ID NO: 2734 - protein, 5 aa, Homo sapiens
ASAAH

SEQ ID NO: 2735 - protein, 5 aa, Homo sapiens
VLLLQ

SEQ ID NO: 2736 - protein, 5 aa, Homo sapiens
QTLLS

SEQ ID NO: 2737 - protein, 5 aa, Homo sapiens
PGTSM

SEQ ID NO: 2738 - protein, 5 aa, Homo sapiens
NHILD

SEQ ID NO: 2739 - protein, 5 aa, Homo sapiens
REIKS

SEQ ID NO: 2740 - protein, 5 aa, Homo sapiens
LQKPH

SEQ ID NO: 2741 - protein, 5 aa, Homo sapiens
GRPLT

SEQ ID NO: 2742 - protein, 5 aa, Homo sapiens
VIFYT

SEQ ID NO: 2743 - protein, 5 aa, Homo sapiens
LPLGR

SEQ ID NO: 2744 - protein, 5 aa, Homo sapiens
GGEEL

SEQ ID NO: 2745 - protein, 5 aa, Homo sapiens
TCCIL

SEQ ID NO: 2746 - protein, 5 aa, Homo sapiens
DSMDR

SEQ ID NO: 2747 - protein, 5 aa, Homo sapiens
LQRHK

SEQ ID NO: 2748 - protein, 5 aa, Homo sapiens
LLNSS

SEQ ID NO: 2749 - protein, 5 aa, Homo sapiens
YFPVA

SEQ ID NO: 2750 - protein, 5 aa, Homo sapiens
YCVHS

SEQ ID NO: 2751 - protein, 5 aa, Homo sapiens
KKATA

SEQ ID NO: 2752 - protein, 5 aa, Homo sapiens
KRERQ

SEQ ID NO: 2753 - protein, 5 aa, Homo sapiens
PAAQP

SEQ ID NO: 2754 - protein, 5 aa, Homo sapiens
PYKCE

SEQ ID NO: 2755 - protein, 5 aa, Homo sapiens
QAVNR

SEQ ID NO: 2756 - protein, 5 aa, Homo sapiens
DHPPS

SEQ ID NO: 2757 - protein, 5 aa, Homo sapiens
SQSEL

SEQ ID NO: 2758 - protein, 5 aa, Homo sapiens
QSTEL

SEQ ID NO: 2759 - protein, 5 aa, Homo sapiens
EPAGY

SEQ ID NO: 2760 - protein, 5 aa, Homo sapiens
PSPTQ

SEQ ID NO: 2761 - protein, 5 aa, Homo sapiens
NDIPY

SEQ ID NO: 2762 - protein, 5 aa, Homo sapiens
RFPAP

SEQ ID NO: 2763 - protein, 5 aa, Homo sapiens
FMTNQ

SEQ ID NO: 2764 - protein, 5 aa, Homo sapiens
LFAED

SEQ ID NO: 2765 - protein, 5 aa, Homo sapiens
YDLDL

SEQ ID NO: 2766 - protein, 5 aa, Homo sapiens
RWGAH

SEQ ID NO: 2767 - protein, 5 aa, Homo sapiens
RPGRD

SEQ ID NO: 2768 - protein, 5 aa, Homo sapiens
FGVMS

SEQ ID NO: 2769 - protein, 5 aa, Homo sapiens
DSYYY

SEQ ID NO: 2770 - protein, 5 aa, Homo sapiens
MTVSG

SEQ ID NO: 2771 - protein, 5 aa, Homo sapiens
IITIT

SEQ ID NO: 2772 - protein, 5 aa, Homo sapiens
EKDQT

SEQ ID NO: 2773 - protein, 5 aa, Homo sapiens
KCIIM

SEQ ID NO: 2774 - protein, 5 aa, Homo sapiens
VPSNN

SEQ ID NO: 2775 - protein, 5 aa, Homo sapiens
VYERA

SEQ ID NO: 2776 - protein, 5 aa, Homo sapiens
RDDED

SEQ ID NO: 2777 - protein, 5 aa, Homo sapiens
QILNY

SEQ ID NO: 2778 - protein, 5 aa, Homo sapiens
VRASF

SEQ ID NO: 2779 - protein, 5 aa, Homo sapiens
IQEKC

SEQ ID NO: 2780 - protein, 5 aa, Homo sapiens
LPWPL

SEQ ID NO: 2781 - protein, 5 aa, Homo sapiens
LEAEV

SEQ ID NO: 2782 - protein, 5 aa, Homo sapiens
TALTN

SEQ ID NO: 2783 - protein, 5 aa, Homo sapiens
QLSRT

SEQ ID NO: 2784 - protein, 5 aa, Homo sapiens
CISDA

SEQ ID NO: 2785 - protein, 5 aa, Homo sapiens
HPLLG

SEQ ID NO: 2786 - protein, 5 aa, Homo sapiens
HCVIF

SEQ ID NO: 2787 - protein, 5 aa, Homo sapiens
DYAKL

SEQ ID NO: 2788 - protein, 5 aa, Homo sapiens
FHPGH

SEQ ID NO: 2789 - protein, 5 aa, Homo sapiens
GTRRR

SEQ ID NO: 2790 - protein, 5 aa, Homo sapiens
LDELV

SEQ ID NO: 2791 - protein, 5 aa, Homo sapiens
QGLEA

SEQ ID NO: 2792 - protein, 5 aa, Homo sapiens
QKKRN

SEQ ID NO: 2793 - protein, 5 aa, Homo sapiens
TTAQV

SEQ ID NO: 2794 - protein, 5 aa, Homo sapiens
SKSEE

SEQ ID NO: 2795 - protein, 5 aa, Homo sapiens
TLVDG

SEQ ID NO: 2796 - protein, 5 aa, Homo sapiens
KTKTT

SEQ ID NO: 2797 - protein, 5 aa, Homo sapiens
YRQQL

SEQ ID NO: 2798 - protein, 5 aa, Homo sapiens
EKEAM

SEQ ID NO: 2799 - protein, 5 aa, Homo sapiens
RMRLQ

SEQ ID NO: 2800 - protein, 5 aa, Homo sapiens
AKAED

SEQ ID NO: 2801 - protein, 5 aa, Homo sapiens
EDEEG

SEQ ID NO: 2802 - protein, 5 aa, Homo sapiens
VKMLK

SEQ ID NO: 2803 - protein, 5 aa, Homo sapiens
EIAAC

SEQ ID NO: 2804 - protein, 5 aa, Homo sapiens
VVPPM

SEQ ID NO: 2805 - protein, 5 aa, Homo sapiens
NHTTE

SEQ ID NO: 2806 - protein, 5 aa, Homo sapiens
ANKIL

SEQ ID NO: 2807 - protein, 5 aa, Homo sapiens
SGDEA

SEQ ID NO: 2808 - protein, 5 aa, Homo sapiens
LLLFG

SEQ ID NO: 2809 - protein, 5 aa, Homo sapiens
RGGPE

SEQ ID NO: 2810 - protein, 5 aa, Homo sapiens
AVAKV

SEQ ID NO: 2811 - protein, 5 aa, Homo sapiens
KKLIF

SEQ ID NO: 2812 - protein, 5 aa, Homo sapiens
KYQHI

SEQ ID NO: 2813 - protein, 5 aa, Homo sapiens
EDSVF

SEQ ID NO: 2814 - protein, 5 aa, Homo sapiens
ELFGP

SEQ ID NO: 2815 - protein, 5 aa, Homo sapiens
LPHQL

SEQ ID NO: 2816 - protein, 5 aa, Homo sapiens
SFLSP

SEQ ID NO: 2817 - protein, 5 aa, Homo sapiens
QRMGD

SEQ ID NO: 2818 - protein, 5 aa, Homo sapiens
LETKD

SEQ ID NO: 2819 - protein, 5 aa, Homo sapiens
KSRRS

SEQ ID NO: 2820 - protein, 5 aa, Homo sapiens
MVGLI

SEQ ID NO: 2821 - protein, 5 aa, Homo sapiens
FPLRA

SEQ ID NO: 2822 - protein, 5 aa, Homo sapiens
AVQRQ

SEQ ID NO: 2823 - protein, 5 aa, Homo sapiens
YIYNF

SEQ ID NO: 2824 - protein, 5 aa, Homo sapiens
LLQLH

SEQ ID NO: 2825 - protein, 5 aa, Homo sapiens
AGKRR

SEQ ID NO: 2826 - protein, 5 aa, Homo sapiens
CKYRP

SEQ ID NO: 2827 - protein, 5 aa, Homo sapiens
VGFSV

SEQ ID NO: 2828 - protein, 5 aa, Homo sapiens
NKPVC

SEQ ID NO: 2829 - protein, 5 aa, Homo sapiens
EDLLE

SEQ ID NO: 2830 - protein, 5 aa, Homo sapiens
HKMAS

SEQ ID NO: 2831 - protein, 5 aa, Homo sapiens
MQVYA

SEQ ID NO: 2832 - protein, 5 aa, Homo sapiens
RTVAL

SEQ ID NO: 2833 - protein, 5 aa, Homo sapiens
EDEGN

SEQ ID NO: 2834 - protein, 5 aa, Homo sapiens
YLMLK

SEQ ID NO: 2835 - protein, 5 aa, Homo sapiens
EEIKS

SEQ ID NO: 2836 - protein, 5 aa, Homo sapiens
KSKKK

SEQ ID NO: 2837 - protein, 5 aa, Homo sapiens
LKNKK

SEQ ID NO: 2838 - protein, 5 aa, Homo sapiens
NSTAI

SEQ ID NO: 2839 - protein, 5 aa, Homo sapiens
PGGGH

SEQ ID NO: 2840 - protein, 5 aa, Homo sapiens
RESIL

SEQ ID NO: 2841 - protein, 5 aa, Homo sapiens
SFSEP

SEQ ID NO: 2842 - protein, 5 aa, Homo sapiens
LPEKY

SEQ ID NO: 2843 - protein, 5 aa, Homo sapiens
SILEW

SEQ ID NO: 2844 - protein, 5 aa, Homo sapiens
GATGR

SEQ ID NO: 2845 - protein, 5 aa, Homo sapiens
FEGVD

SEQ ID NO: 2846 - protein, 5 aa, Homo sapiens
QRCTP

SEQ ID NO: 2847 - protein, 5 aa, Homo sapiens
QLNQQ

SEQ ID NO: 2848 - protein, 5 aa, Homo sapiens
VHEGQ

SEQ ID NO: 2849 - protein, 5 aa, Homo sapiens
LVESL

SEQ ID NO: 2850 - protein, 5 aa, Homo sapiens
RSVSS

SEQ ID NO: 2851 - protein, 5 aa, Homo sapiens
LVQSS

SEQ ID NO: 2852 - protein, 5 aa, Homo sapiens
LSTDL

SEQ ID NO: 2853 - protein, 5 aa, Homo sapiens
VLRKK

SEQ ID NO: 2854 - protein, 5 aa, Homo sapiens
TKISS

SEQ ID NO: 2855 - protein, 5 aa, Homo sapiens
SETHC

SEQ ID NO: 2856 - protein, 5 aa, Homo sapiens
SLLNW

SEQ ID NO: 2857 - protein, 5 aa, Homo sapiens
GQSPQ

SEQ ID NO: 2858 - protein, 5 aa, Homo sapiens
SESQV

SEQ ID NO: 2859 - protein, 5 aa, Homo sapiens
ARTRK

SEQ ID NO: 2860 - protein, 5 aa, Homo sapiens
GEDHA

SEQ ID NO: 2861 - protein, 5 aa, Homo sapiens
LSEVA

SEQ ID NO: 2862 - protein, 5 aa, Homo sapiens
SCVLA

SEQ ID NO: 2863 - protein, 5 aa, Homo sapiens
TSCPC

SEQ ID NO: 2864 - protein, 5 aa, Homo sapiens
DRWRH

SEQ ID NO: 2865 - protein, 5 aa, Homo sapiens
QADAL

SEQ ID NO: 2866 - protein, 5 aa, Homo sapiens
MLKDS

SEQ ID NO: 2867 - protein, 5 aa, Homo sapiens
GNVSE

SEQ ID NO: 2868 - protein, 5 aa, Homo sapiens
RRGNE

SEQ ID NO: 2869 - protein, 5 aa, Homo sapiens
CSRLI

SEQ ID NO: 2870 - protein, 5 aa, Homo sapiens
VQYSK

SEQ ID NO: 2871 - protein, 5 aa, Homo sapiens
TCIKK

SEQ ID NO: 2872 - protein, 5 aa, Homo sapiens
SELQL

SEQ ID NO: 2873 - protein, 5 aa, Homo sapiens
VISAR

SEQ ID NO: 2874 - protein, 5 aa, Homo sapiens
SSGPA

SEQ ID NO: 2875 - protein, 5 aa, Homo sapiens
NFTQY

SEQ ID NO: 2876 - protein, 5 aa, Homo sapiens
TLVVD

SEQ ID NO: 2877 - protein, 5 aa, Homo sapiens
VGIYV

SEQ ID NO: 2878 - protein, 5 aa, Homo sapiens
RWSKY

SEQ ID NO: 2879 - protein, 5 aa, Homo sapiens
SEMEV

SEQ ID NO: 2880 - protein, 5 aa, Homo sapiens
EHRNV

SEQ ID NO: 2881 - protein, 5 aa, Homo sapiens
EDSFL

SEQ ID NO: 2882 - protein, 5 aa, Homo sapiens
PRENR

SEQ ID NO: 2883 - protein, 5 aa, Homo sapiens
DTSDV

SEQ ID NO: 2884 - protein, 5 aa, Homo sapiens
YDGND

SEQ ID NO: 2885 - protein, 5 aa, Homo sapiens
QKSAG

SEQ ID NO: 2886 - protein, 5 aa, Homo sapiens
QLCPL

SEQ ID NO: 2887 - protein, 5 aa, Homo sapiens
KRVVS

SEQ ID NO: 2888 - protein, 5 aa, Homo sapiens
NDACT

SEQ ID NO: 2889 - protein, 5 aa, Homo sapiens
LVTSV

SEQ ID NO: 2890 - protein, 5 aa, Homo sapiens
YLHFF

SEQ ID NO: 2891 - protein, 5 aa, Homo sapiens
IMNGH

SEQ ID NO: 2892 - protein, 5 aa, Homo sapiens
LCGGN

SEQ ID NO: 2893 - protein, 5 aa, Homo sapiens
RNHTL

SEQ ID NO: 2894 - protein, 5 aa, Homo sapiens
RETVL

SEQ ID NO: 2895 - protein, 5 aa, Homo sapiens
CKSEE

SEQ ID NO: 2896 - protein, 5 aa, Homo sapiens
NRLPK

SEQ ID NO: 2897 - protein, 5 aa, Homo sapiens
TNGYH

SEQ ID NO: 2898 - protein, 5 aa, Homo sapiens
ASSSQ

SEQ ID NO: 2899 - protein, 5 aa, Homo sapiens
RSASP

SEQ ID NO: 2900 - protein, 5 aa, Homo sapiens
LFPAS

SEQ ID NO: 2901 - protein, 5 aa, Homo sapiens
GRRNL

SEQ ID NO: 2902 - protein, 5 aa, Homo sapiens
ESAGV

SEQ ID NO: 2903 - protein, 5 aa, Homo sapiens
AAAKA

SEQ ID NO: 2904 - protein, 5 aa, Homo sapiens
EEEEE

SEQ ID NO: 2905 - protein, 5 aa, Homo sapiens
MLLGL

SEQ ID NO: 2906 - protein, 5 aa, Homo sapiens
EMVHS

SEQ ID NO: 2907 - protein, 5 aa, Homo sapiens
MGRWE

SEQ ID NO: 2908 - protein, 5 aa, Homo sapiens
HDVGR

SEQ ID NO: 2909 - protein, 5 aa, Homo sapiens
FFVRD

SEQ ID NO: 2910 - protein, 5 aa, Homo sapiens
HTRKK

SEQ ID NO: 2911 - protein, 5 aa, Homo sapiens
FFSKL

SEQ ID NO: 2912 - protein, 5 aa, Homo sapiens
PSRSM

SEQ ID NO: 2913 - protein, 5 aa, Homo sapiens
PNTGK

SEQ ID NO: 2914 - protein, 5 aa, Homo sapiens
KYLLQ

SEQ ID NO: 2915 - protein, 5 aa, Homo sapiens
ICFPS

SEQ ID NO: 2916 - protein, 5 aa, Homo sapiens
GSGWH

SEQ ID NO: 2917 - protein, 5 aa, Homo sapiens
RKDYT

SEQ ID NO: 2918 - protein, 5 aa, Homo sapiens
NAPEY

SEQ ID NO: 2919 - protein, 5 aa, Homo sapiens
FVLYQ

SEQ ID NO: 2920 - protein, 5 aa, Homo sapiens
HKDLD

SEQ ID NO: 2921 - protein, 5 aa, Homo sapiens
ASYVS

SEQ ID NO: 2922 - protein, 5 aa, Homo sapiens
TWGGC

SEQ ID NO: 2923 - protein, 5 aa, Homo sapiens
INGMI

SEQ ID NO: 2924 - protein, 5 aa, Homo sapiens
GEETK

SEQ ID NO: 2925 - protein, 5 aa, Homo sapiens
LKRKK

SEQ ID NO: 2926 - protein, 5 aa, Homo sapiens
RENEN

SEQ ID NO: 2927 - protein, 5 aa, Homo sapiens
SLPSH

SEQ ID NO: 2928 - protein, 5 aa, Homo sapiens
GYEVM

SEQ ID NO: 2929 - protein, 5 aa, Homo sapiens
SAHSY

SEQ ID NO: 2930 - protein, 5 aa, Homo sapiens
EKGLF

SEQ ID NO: 2931 - protein, 5 aa, Homo sapiens
TLSPV

SEQ ID NO: 2932 - protein, 5 aa, Homo sapiens
LKPWA

SEQ ID NO: 2933 - protein, 5 aa, Homo sapiens
RCGCS

SEQ ID NO: 2934 - protein, 5 aa, Homo sapiens
LTLDV

SEQ ID NO: 2935 - protein, 5 aa, Homo sapiens
AQAVY

SEQ ID NO: 2936 - protein, 5 aa, Homo sapiens
QSAPS

SEQ ID NO: 2937 - protein, 5 aa, Homo sapiens
SVRFA

SEQ ID NO: 2938 - protein, 5 aa, Homo sapiens
EGNPE

SEQ ID NO: 2939 - protein, 5 aa, Homo sapiens
GANSV

SEQ ID NO: 2940 - protein, 5 aa, Homo sapiens
PQGSP

SEQ ID NO: 2941 - protein, 5 aa, Homo sapiens
PSAFL

SEQ ID NO: 2942 - protein, 5 aa, Homo sapiens
HIILK

SEQ ID NO: 2943 - protein, 5 aa, Homo sapiens
EVHQT

SEQ ID NO: 2944 - protein, 5 aa, Homo sapiens
PVSLR

SEQ ID NO: 2945 - protein, 5 aa, Homo sapiens
GAVNV

SEQ ID NO: 2946 - protein, 5 aa, Homo sapiens
TAMPH

SEQ ID NO: 2947 - protein, 5 aa, Homo sapiens
CRTKY

SEQ ID NO: 2948 - protein, 5 aa, Homo sapiens
EDVKI

SEQ ID NO: 2949 - protein, 5 aa, Homo sapiens
PSHKH

SEQ ID NO: 2950 - protein, 5 aa, Homo sapiens
NTQAL

SEQ ID NO: 2951 - protein, 5 aa, Homo sapiens
EGTGV

SEQ ID NO: 2952 - protein, 5 aa, Homo sapiens
DLYQE

SEQ ID NO: 2953 - protein, 5 aa, Homo sapiens
QEMAL

SEQ ID NO: 2954 - protein, 5 aa, Homo sapiens
RTKEQ

SEQ ID NO: 2955 - protein, 5 aa, Homo sapiens
ETFGR

SEQ ID NO: 2956 - protein, 5 aa, Homo sapiens
PEVTE

SEQ ID NO: 2957 - protein, 5 aa, Homo sapiens
AQEAD

SEQ ID NO: 2958 - protein, 5 aa, Homo sapiens
PWTFW

SEQ ID NO: 2959 - protein, 5 aa, Homo sapiens
RGRPH

SEQ ID NO: 2960 - protein, 5 aa, Homo sapiens
SFASL

SEQ ID NO: 2961 - protein, 5 aa, Homo sapiens
ADTGR

SEQ ID NO: 2962 - protein, 5 aa, Homo sapiens
VTSND

SEQ ID NO: 2963 - protein, 5 aa, Homo sapiens
KRKFS

SEQ ID NO: 2964 - protein, 5 aa, Homo sapiens
SKHLL

SEQ ID NO: 2965 - protein, 5 aa, Homo sapiens
GAPLT

SEQ ID NO: 2966 - protein, 5 aa, Homo sapiens
LKPQD

SEQ ID NO: 2967 - protein, 5 aa, Homo sapiens
QMATE

SEQ ID NO: 2968 - protein, 5 aa, Homo sapiens
TENEA

SEQ ID NO: 2969 - protein, 5 aa, Homo sapiens
PTLVA

SEQ ID NO: 2970 - protein, 5 aa, Homo sapiens
PGLEV

SEQ ID NO: 2971 - protein, 5 aa, Homo sapiens
QIQVA

SEQ ID NO: 2972 - protein, 5 aa, Homo sapiens
VSDEQ

SEQ ID NO: 2973 - protein, 5 aa, Homo sapiens
KRYTA

SEQ ID NO: 2974 - protein, 5 aa, Homo sapiens
ENQEH

SEQ ID NO: 2975 - protein, 5 aa, Homo sapiens
LFLVL

SEQ ID NO: 2976 - protein, 5 aa, Homo sapiens
QRRLS

SEQ ID NO: 2977 - protein, 5 aa, Homo sapiens
LEAGS

SEQ ID NO: 2978 - protein, 5 aa, Homo sapiens
SRFLS

SEQ ID NO: 2979 - protein, 5 aa, Homo sapiens
SIEKP

SEQ ID NO: 2980 - protein, 5 aa, Homo sapiens
PSSAP

SEQ ID NO: 2981 - protein, 5 aa, Homo sapiens
TISRG

SEQ ID NO: 2982 - protein, 5 aa, Homo sapiens
FWTLP

SEQ ID NO: 2983 - protein, 5 aa, Homo sapiens
SITAS

SEQ ID NO: 2984 - protein, 5 aa, Homo sapiens
DKRFI

SEQ ID NO: 2985 - protein, 5 aa, Homo sapiens
SSAEV

SEQ ID NO: 2986 - protein, 5 aa, Homo sapiens
LAVSP

SEQ ID NO: 2987 - protein, 5 aa, Homo sapiens
TRQAL

SEQ ID NO: 2988 - protein, 5 aa, Homo sapiens
QVSYV

SEQ ID NO: 2989 - protein, 5 aa, Homo sapiens
MSTKL

SEQ ID NO: 2990 - protein, 5 aa, Homo sapiens
QINKP

SEQ ID NO: 2991 - protein, 5 aa, Homo sapiens
VSVCK

SEQ ID NO: 2992 - protein, 5 aa, Homo sapiens
MGDRN

SEQ ID NO: 2993 - protein, 5 aa, Homo sapiens
LQRQC

SEQ ID NO: 2994 - protein, 5 aa, Homo sapiens
NGYPV

SEQ ID NO: 2995 - protein, 5 aa, Homo sapiens
AQQEA

SEQ ID NO: 2996 - protein, 5 aa, Homo sapiens
QQLAH

SEQ ID NO: 2997 - protein, 5 aa, Homo sapiens
TLKVT

SEQ ID NO: 2998 - protein, 5 aa, Homo sapiens
KLKSE

SEQ ID NO: 2999 - protein, 5 aa, Homo sapiens
PAYTP

SEQ ID NO: 3000 - protein, 5 aa, Homo sapiens
PGTRT

SEQ ID NO: 3001 - protein, 5 aa, Homo sapiens
TWKKR

SEQ ID NO: 3002 - protein, 5 aa, Homo sapiens
NQSAV

SEQ ID NO: 3003 - protein, 5 aa, Homo sapiens
HVTWP

SEQ ID NO: 3004 - protein, 5 aa, Homo sapiens
QVFES

SEQ ID NO: 3005 - protein, 5 aa, Homo sapiens
AMEVT

SEQ ID NO: 3006 - protein, 5 aa, Homo sapiens
VTLEY

SEQ ID NO: 3007 - protein, 5 aa, Homo sapiens
NEILS

SEQ ID NO: 3008 - protein, 5 aa, Homo sapiens
KCKWM

SEQ ID NO: 3009 - protein, 5 aa, Homo sapiens
AESEA

SEQ ID NO: 3010 - protein, 5 aa, Homo sapiens
TPMES

SEQ ID NO: 3011 - protein, 5 aa, Homo sapiens
INGDI

SEQ ID NO: 3012 - protein, 5 aa, Homo sapiens
NQNMQ

SEQ ID NO: 3013 - protein, 5 aa, Homo sapiens
GLCDR

SEQ ID NO: 3014 - protein, 5 aa, Homo sapiens
SVCPS

SEQ ID NO: 3015 - protein, 5 aa, Homo sapiens
EKLVI

SEQ ID NO: 3016 - protein, 5 aa, Homo sapiens
GAFKN

SEQ ID NO: 3017 - protein, 5 aa, Homo sapiens
SSESD

SEQ ID NO: 3018 - protein, 5 aa, Homo sapiens
LLVSK

SEQ ID NO: 3019 - protein, 5 aa, Homo sapiens
KGNHL

SEQ ID NO: 3020 - protein, 5 aa, Homo sapiens
ILDTL

SEQ ID NO: 3021 - protein, 5 aa, Homo sapiens
VAPLQ

SEQ ID NO: 3022 - protein, 5 aa, Homo sapiens
RARLS

SEQ ID NO: 3023 - protein, 5 aa, Homo sapiens
NLLRD

SEQ ID NO: 3024 - protein, 5 aa, Homo sapiens
QSRRK

SEQ ID NO: 3025 - protein, 5 aa, Homo sapiens
AQSVQ

SEQ ID NO: 3026 - protein, 5 aa, Homo sapiens
LSLPA

SEQ ID NO: 3027 - protein, 5 aa, Homo sapiens
ELLNV

SEQ ID NO: 3028 - protein, 5 aa, Homo sapiens
ALRQM

SEQ ID NO: 3029 - protein, 5 aa, Homo sapiens
DQGGH

SEQ ID NO: 3030 - protein, 5 aa, Homo sapiens
EGEEN

SEQ ID NO: 3031 - protein, 5 aa, Homo sapiens
NRSKE

SEQ ID NO: 3032 - protein, 5 aa, Homo sapiens
EELAK

SEQ ID NO: 3033 - protein, 5 aa, Homo sapiens
TAKPS

SEQ ID NO: 3034 - protein, 5 aa, Homo sapiens
IPALS

SEQ ID NO: 3035 - protein, 5 aa, Homo sapiens
MELTM

SEQ ID NO: 3036 - protein, 5 aa, Homo sapiens
CWFHK

SEQ ID NO: 3037 - protein, 5 aa, Homo sapiens
VELIE

SEQ ID NO: 3038 - protein, 5 aa, Homo sapiens
LWPSR

SEQ ID NO: 3039 - protein, 5 aa, Homo sapiens
SSGSH

SEQ ID NO: 3040 - protein, 5 aa, Homo sapiens
TKVSK

SEQ ID NO: 3041 - protein, 5 aa, Homo sapiens
RLHSY

SEQ ID NO: 3042 - protein, 5 aa, Homo sapiens
RPQCE

SEQ ID NO: 3043 - protein, 5 aa, Homo sapiens
VSWNW

SEQ ID NO: 3044 - protein, 5 aa, Homo sapiens
TLLAL

SEQ ID NO: 3045 - protein, 5 aa, Homo sapiens
QEQKM

SEQ ID NO: 3046 - protein, 5 aa, Homo sapiens
DSSTA

SEQ ID NO: 3047 - protein, 5 aa, Homo sapiens
RVARR

SEQ ID NO: 3048 - protein, 5 aa, Homo sapiens
ELPNS

SEQ ID NO: 3049 - protein, 5 aa, Homo sapiens
ARKFS

SEQ ID NO: 3050 - protein, 5 aa, Homo sapiens
AQGMR

SEQ ID NO: 3051 - protein, 5 aa, Homo sapiens
FHIRI

SEQ ID NO: 3052 - protein, 5 aa, Homo sapiens
FCHSL

SEQ ID NO: 3053 - protein, 5 aa, Homo sapiens
PVPGG

SEQ ID NO: 3054 - protein, 5 aa, Homo sapiens
GLVLQ

SEQ ID NO: 3055 - protein, 5 aa, Homo sapiens
SRSRT

SEQ ID NO: 3056 - protein, 5 aa, Homo sapiens
TSPPW

SEQ ID NO: 3057 - protein, 5 aa, Homo sapiens
KAGRH

SEQ ID NO: 3058 - protein, 5 aa, Homo sapiens
YDNIE

SEQ ID NO: 3059 - protein, 5 aa, Homo sapiens
AADQP

SEQ ID NO: 3060 - protein, 5 aa, Homo sapiens
GTKTA

SEQ ID NO: 3061 - protein, 5 aa, Homo sapiens
FPGFK

SEQ ID NO: 3062 - protein, 5 aa, Homo sapiens
PPKGT

SEQ ID NO: 3063 - protein, 5 aa, Homo sapiens
CFTSE

SEQ ID NO: 3064 - protein, 5 aa, Homo sapiens
ERKCP

SEQ ID NO: 3065 - protein, 5 aa, Homo sapiens
ATPDN

SEQ ID NO: 3066 - protein, 5 aa, Homo sapiens
SPRRY

SEQ ID NO: 3067 - protein, 5 aa, Homo sapiens
TFDIA

SEQ ID NO: 3068 - protein, 5 aa, Homo sapiens
PVQFD

SEQ ID NO: 3069 - protein, 5 aa, Homo sapiens
SMMHL

SEQ ID NO: 3070 - protein, 5 aa, Homo sapiens
KYYEA

SEQ ID NO: 3071 - protein, 5 aa, Homo sapiens
IQSQI

SEQ ID NO: 3072 - protein, 5 aa, Homo sapiens
FNGET

SEQ ID NO: 3073 - protein, 5 aa, Homo sapiens
YELQP

SEQ ID NO: 3074 - protein, 5 aa, Homo sapiens
KTAKE

SEQ ID NO: 3075 - protein, 5 aa, Homo sapiens
QEYSL

SEQ ID NO: 3076 - protein, 5 aa, Homo sapiens
DQVCT

SEQ ID NO: 3077 - protein, 5 aa, Homo sapiens
LNIND

SEQ ID NO: 3078 - protein, 5 aa, Homo sapiens
FQEDE

SEQ ID NO: 3079 - protein, 5 aa, Homo sapiens
LTMLF

SEQ ID NO: 3080 - protein, 5 aa, Homo sapiens
FQQCD

SEQ ID NO: 3081 - protein, 5 aa, Homo sapiens
LGHRL

SEQ ID NO: 3082 - protein, 5 aa, Homo sapiens
EPGAA

SEQ ID NO: 3083 - protein, 5 aa, Homo sapiens
RKEKV

SEQ ID NO: 3084 - protein, 5 aa, Homo sapiens
FLSTE

SEQ ID NO: 3085 - protein, 5 aa, Homo sapiens
IIEKW

SEQ ID NO: 3086 - protein, 5 aa, Homo sapiens
MWQEI

SEQ ID NO: 3087 - protein, 5 aa, Homo sapiens
KREEL

SEQ ID NO: 3088 - protein, 5 aa, Homo sapiens
KEYFI

SEQ ID NO: 3089 - protein, 5 aa, Homo sapiens
LGQDL

SEQ ID NO: 3090 - protein, 5 aa, Homo sapiens
TCEIQ

SEQ ID NO: 3091 - protein, 5 aa, Homo sapiens
DKEQA

SEQ ID NO: 3092 - protein, 5 aa, Homo sapiens
RLDFH

SEQ ID NO: 3093 - protein, 5 aa, Homo sapiens
LMSFE

SEQ ID NO: 3094 - protein, 5 aa, Homo sapiens
NTLGG

SEQ ID NO: 3095 - protein, 5 aa, Homo sapiens
RFFSK

SEQ ID NO: 3096 - protein, 5 aa, Homo sapiens
CRSGV

SEQ ID NO: 3097 - protein, 5 aa, Homo sapiens
EEGES

SEQ ID NO: 3098 - protein, 5 aa, Homo sapiens
DKKCS

SEQ ID NO: 3099 - protein, 5 aa, Homo sapiens
MSPPL

SEQ ID NO: 3100 - protein, 5 aa, Homo sapiens
VLPPH

SEQ ID NO: 3101 - protein, 5 aa, Homo sapiens
MVSGL

SEQ ID NO: 3102 - protein, 5 aa, Homo sapiens
SYVLF

SEQ ID NO: 3103 - protein, 5 aa, Homo sapiens
TMDTS

SEQ ID NO: 3104 - protein, 5 aa, Homo sapiens
HRIYS

SEQ ID NO: 3105 - protein, 5 aa, Homo sapiens
DLEID

SEQ ID NO: 3106 - protein, 5 aa, Homo sapiens
YAVKA

SEQ ID NO: 3107 - protein, 5 aa, Homo sapiens
SYPNV

SEQ ID NO: 3108 - protein, 5 aa, Homo sapiens
ARKTV

SEQ ID NO: 3109 - protein, 5 aa, Homo sapiens
YESEI

SEQ ID NO: 3110 - protein, 5 aa, Homo sapiens
RLGDQ

SEQ ID NO: 3111 - protein, 5 aa, Homo sapiens
TRGKM

SEQ ID NO: 3112 - protein, 5 aa, Homo sapiens
LRRKD

SEQ ID NO: 3113 - protein, 5 aa, Homo sapiens
LLNFA

SEQ ID NO: 3114 - protein, 5 aa, Homo sapiens
HRDSE

SEQ ID NO: 3115 - protein, 5 aa, Homo sapiens
TPKGP

SEQ ID NO: 3116 - protein, 5 aa, Homo sapiens
QPAAS

SEQ ID NO: 3117 - protein, 5 aa, Homo sapiens
LRKMG

SEQ ID NO: 3118 - protein, 5 aa, Homo sapiens
KPAEE

SEQ ID NO: 3119 - protein, 5 aa, Homo sapiens
FRFPD

SEQ ID NO: 3120 - protein, 5 aa, Homo sapiens
QWPPG

SEQ ID NO: 3121 - protein, 5 aa, Homo sapiens
VATAF

SEQ ID NO: 3122 - protein, 5 aa, Homo sapiens
LSSSS

SEQ ID NO: 3123 - protein, 5 aa, Homo sapiens
VLCCQ

SEQ ID NO: 3124 - protein, 5 aa, Homo sapiens
LLDSP

SEQ ID NO: 3125 - protein, 5 aa, Homo sapiens
NTVFS

SEQ ID NO: 3126 - protein, 5 aa, Homo sapiens
TLQSH

SEQ ID NO: 3127 - protein, 5 aa, Homo sapiens
TDLPL

SEQ ID NO: 3128 - protein, 5 aa, Homo sapiens
RAGAR

SEQ ID NO: 3129 - protein, 5 aa, Homo sapiens
SSDEP

SEQ ID NO: 3130 - protein, 5 aa, Homo sapiens
KAKGK

SEQ ID NO: 3131 - protein, 5 aa, Homo sapiens
LCPLR

SEQ ID NO: 3132 - protein, 5 aa, Homo sapiens
KPCVM

SEQ ID NO: 3133 - protein, 5 aa, Homo sapiens
YVSQN

SEQ ID NO: 3134 - protein, 5 aa, Homo sapiens
GEDEA

SEQ ID NO: 3135 - protein, 5 aa, Homo sapiens
REEYR

SEQ ID NO: 3136 - protein, 5 aa, Homo sapiens
RLQWG

SEQ ID NO: 3137 - protein, 5 aa, Homo sapiens
PQSAL

SEQ ID NO: 3138 - protein, 5 aa, Homo sapiens
LSSLI

SEQ ID NO: 3139 - protein, 5 aa, Homo sapiens
EMSST

SEQ ID NO: 3140 - protein, 5 aa, Homo sapiens
AHLSD

SEQ ID NO: 3141 - protein, 5 aa, Homo sapiens
QKHSS

SEQ ID NO: 3142 - protein, 5 aa, Homo sapiens
PMHSN

SEQ ID NO: 3143 - protein, 5 aa, Homo sapiens
AEEEA

SEQ ID NO: 3144 - protein, 5 aa, Homo sapiens
LTLKG

SEQ ID NO: 3145 - protein, 5 aa, Homo sapiens
GRSKQ

SEQ ID NO: 3146 - protein, 5 aa, Homo sapiens
DPSTT

SEQ ID NO: 3147 - protein, 5 aa, Homo sapiens
IKIFD

SEQ ID NO: 3148 - protein, 5 aa, Homo sapiens
DGEAE

SEQ ID NO: 3149 - protein, 5 aa, Homo sapiens
RNGVR

SEQ ID NO: 3150 - protein, 5 aa, Homo sapiens
MKTKK

SEQ ID NO: 3151 - protein, 5 aa, Homo sapiens
DETPK

SEQ ID NO: 3152 - protein, 5 aa, Homo sapiens
QDTSC

SEQ ID NO: 3153 - protein, 5 aa, Homo sapiens
SFFRG

SEQ ID NO: 3154 - protein, 5 aa, Homo sapiens
NPLRK

SEQ ID NO: 3155 - protein, 5 aa, Homo sapiens
AAIKS

SEQ ID NO: 3156 - protein, 5 aa, Homo sapiens
LVHLV

SEQ ID NO: 3157 - protein, 5 aa, Homo sapiens
TVENT

SEQ ID NO: 3158 - protein, 5 aa, Homo sapiens
YRFWK

SEQ ID NO: 3159 - protein, 5 aa, Homo sapiens
CCNFN

SEQ ID NO: 3160 - protein, 5 aa, Homo sapiens
SSLKM

SEQ ID NO: 3161 - protein, 5 aa, Homo sapiens
QQYKA

SEQ ID NO: 3162 - protein, 5 aa, Homo sapiens
KYYTS

SEQ ID NO: 3163 - protein, 5 aa, Homo sapiens
LYWFK

SEQ ID NO: 3164 - protein, 5 aa, Homo sapiens
SESIQ

SEQ ID NO: 3165 - protein, 5 aa, Homo sapiens
CYIFD

SEQ ID NO: 3166 - protein, 5 aa, Homo sapiens
LEPPS

SEQ ID NO: 3167 - protein, 5 aa, Homo sapiens
DGWEG

SEQ ID NO: 3168 - protein, 5 aa, Homo sapiens
PASET

SEQ ID NO: 3169 - protein, 5 aa, Homo sapiens
TIPEV

SEQ ID NO: 3170 - protein, 5 aa, Homo sapiens
QHTEV

SEQ ID NO: 3171 - protein, 5 aa, Homo sapiens
PPSRM

SEQ ID NO: 3172 - protein, 5 aa, Homo sapiens
LWGGV

SEQ ID NO: 3173 - protein, 5 aa, Homo sapiens
PMVIA

SEQ ID NO: 3174 - protein, 5 aa, Homo sapiens
SVEDM

SEQ ID NO: 3175 - protein, 5 aa, Homo sapiens
NSRKK

SEQ ID NO: 3176 - protein, 5 aa, Homo sapiens
SWIGC

SEQ ID NO: 3177 - protein, 5 aa, Homo sapiens
TSIYQ

SEQ ID NO: 3178 - protein, 5 aa, Homo sapiens
VGDMS

SEQ ID NO: 3179 - protein, 5 aa, Homo sapiens
VRQTS

SEQ ID NO: 3180 - protein, 5 aa, Homo sapiens
YVIPR

SEQ ID NO: 3181 - protein, 5 aa, Homo sapiens
STYLH

SEQ ID NO: 3182 - protein, 5 aa, Homo sapiens
VGKTS

SEQ ID NO: 3183 - protein, 5 aa, Homo sapiens
SYSKP

SEQ ID NO: 3184 - protein, 5 aa, Homo sapiens
QKAEN

SEQ ID NO: 3185 - protein, 5 aa, Homo sapiens
LTKDI

SEQ ID NO: 3186 - protein, 5 aa, Homo sapiens
LFPGH

SEQ ID NO: 3187 - protein, 5 aa, Homo sapiens
TEESA

SEQ ID NO: 3188 - protein, 5 aa, Homo sapiens
HLGMS

SEQ ID NO: 3189 - protein, 5 aa, Homo sapiens
LLPPD

SEQ ID NO: 3190 - protein, 5 aa, Homo sapiens
ECRDP

SEQ ID NO: 3191 - protein, 5 aa, Homo sapiens
ILAED

SEQ ID NO: 3192 - protein, 5 aa, Homo sapiens
PRLFK

SEQ ID NO: 3193 - protein, 5 aa, Homo sapiens
KRKKP

SEQ ID NO: 3194 - protein, 5 aa, Homo sapiens
TINAK

SEQ ID NO: 3195 - protein, 5 aa, Homo sapiens
ITDQK

SEQ ID NO: 3196 - protein, 5 aa, Homo sapiens
VILRD

SEQ ID NO: 3197 - protein, 5 aa, Homo sapiens
SLAER

SEQ ID NO: 3198 - protein, 5 aa, Homo sapiens
QESRL

SEQ ID NO: 3199 - protein, 5 aa, Homo sapiens
SHLSS

SEQ ID NO: 3200 - protein, 5 aa, Homo sapiens
QTSTC

SEQ ID NO: 3201 - protein, 5 aa, Homo sapiens
GHMRR

SEQ ID NO: 3202 - protein, 5 aa, Homo sapiens
RCLEH

SEQ ID NO: 3203 - protein, 5 aa, Homo sapiens
EKERS

SEQ ID NO: 3204 - protein, 5 aa, Homo sapiens
WTRLL

SEQ ID NO: 3205 - protein, 5 aa, Homo sapiens
MEDAP

SEQ ID NO: 3206 - protein, 5 aa, Homo sapiens
CLHKE

SEQ ID NO: 3207 - protein, 5 aa, Homo sapiens
ICEEK

SEQ ID NO: 3208 - protein, 5 aa, Homo sapiens
KQAEL

SEQ ID NO: 3209 - protein, 5 aa, Homo sapiens
RYGHL

SEQ ID NO: 3210 - protein, 5 aa, Homo sapiens
SVQKS

SEQ ID NO: 3211 - protein, 5 aa, Homo sapiens
IPQFV

SEQ ID NO: 3212 - protein, 5 aa, Homo sapiens
IRRMN

SEQ ID NO: 3213 - protein, 5 aa, Homo sapiens
TNPNL

SEQ ID NO: 3214 - protein, 5 aa, Homo sapiens
SFSFQ

SEQ ID NO: 3215 - protein, 5 aa, Homo sapiens
ENDEI

SEQ ID NO: 3216 - protein, 5 aa, Homo sapiens
FDGIV

SEQ ID NO: 3217 - protein, 5 aa, Homo sapiens
VVDNS

SEQ ID NO: 3218 - protein, 5 aa, Homo sapiens
SSNSQ

SEQ ID NO: 3219 - protein, 5 aa, Homo sapiens
IELDS

SEQ ID NO: 3220 - protein, 5 aa, Homo sapiens
HSSGL

SEQ ID NO: 3221 - protein, 5 aa, Homo sapiens
KETCQ

SEQ ID NO: 3222 - protein, 5 aa, Homo sapiens
SYCQG

SEQ ID NO: 3223 - protein, 5 aa, Homo sapiens
FPGFL

SEQ ID NO: 3224 - protein, 5 aa, Homo sapiens
HLISR

SEQ ID NO: 3225 - protein, 5 aa, Homo sapiens
KYLKF

SEQ ID NO: 3226 - protein, 5 aa, Homo sapiens
LYTSC

SEQ ID NO: 3227 - protein, 5 aa, Homo sapiens
SECDV

SEQ ID NO: 3228 - protein, 5 aa, Homo sapiens
MSLVS

SEQ ID NO: 3229 - protein, 5 aa, Homo sapiens
RENSS

SEQ ID NO: 3230 - protein, 5 aa, Homo sapiens
CFIPV

SEQ ID NO: 3231 - protein, 5 aa, Homo sapiens
RNNLI

SEQ ID NO: 3232 - protein, 5 aa, Homo sapiens
AQINL

SEQ ID NO: 3233 - protein, 5 aa, Homo sapiens
HKWKS

SEQ ID NO: 3234 - protein, 5 aa, Homo sapiens
ALLPS

SEQ ID NO: 3235 - protein, 5 aa, Homo sapiens
NAKKK

SEQ ID NO: 3236 - protein, 5 aa, Homo sapiens
MSQHM

SEQ ID NO: 3237 - protein, 5 aa, Homo sapiens
DDDAA

SEQ ID NO: 3238 - protein, 5 aa, Homo sapiens
RPRVH

SEQ ID NO: 3239 - protein, 5 aa, Homo sapiens
LGYQT

SEQ ID NO: 3240 - protein, 5 aa, Homo sapiens
DYTDV

SEQ ID NO: 3241 - protein, 5 aa, Homo sapiens
LQQSL

SEQ ID NO: 3242 - protein, 5 aa, Homo sapiens
IKGSR

SEQ ID NO: 3243 - protein, 5 aa, Homo sapiens
EIDQR

SEQ ID NO: 3244 - protein, 5 aa, Homo sapiens
LPLDS

SEQ ID NO: 3245 - protein, 5 aa, Homo sapiens
RCGCS

SEQ ID NO: 3246 - protein, 5 aa, Homo sapiens
KETKL

SEQ ID NO: 3247 - protein, 5 aa, Homo sapiens
IRFSF

SEQ ID NO: 3248 - protein, 5 aa, Homo sapiens
GAGDQ

SEQ ID NO: 3249 - protein, 5 aa, Homo sapiens
FSKCW

SEQ ID NO: 3250 - protein, 5 aa, Homo sapiens
FIPLK

SEQ ID NO: 3251 - protein, 5 aa, Homo sapiens
EDKSG

SEQ ID NO: 3252 - protein, 5 aa, Homo sapiens
TFGLE

SEQ ID NO: 3253 - protein, 5 aa, Homo sapiens
AQAKL

SEQ ID NO: 3254 - protein, 5 aa, Homo sapiens
VMDLY

SEQ ID NO: 3255 - protein, 5 aa, Homo sapiens
KQDYH

SEQ ID NO: 3256 - protein, 5 aa, Homo sapiens
LNQQG

SEQ ID NO: 3257 - protein, 5 aa, Homo sapiens
SHVGA

SEQ ID NO: 3258 - protein, 5 aa, Homo sapiens
NTSVV

SEQ ID NO: 3259 - protein, 5 aa, Homo sapiens
DEDTF

SEQ ID NO: 3260 - protein, 5 aa, Homo sapiens
LLYPM

SEQ ID NO: 3261 - protein, 5 aa, Homo sapiens
VVVSV

SEQ ID NO: 3262 - protein, 5 aa, Homo sapiens
KVKMK

SEQ ID NO: 3263 - protein, 5 aa, Homo sapiens
EVTRL

SEQ ID NO: 3264 - protein, 5 aa, Homo sapiens
LGFKI

SEQ ID NO: 3265 - protein, 5 aa, Homo sapiens
MEGLL

SEQ ID NO: 3266 - protein, 5 aa, Homo sapiens
STQSS

SEQ ID NO: 3267 - protein, 5 aa, Homo sapiens
APQVR

SEQ ID NO: 3268 - protein, 5 aa, Homo sapiens
ESTYF

SEQ ID NO: 3269 - protein, 5 aa, Homo sapiens
VGSLV

SEQ ID NO: 3270 - protein, 5 aa, Homo sapiens
LETSL

SEQ ID NO: 3271 - protein, 5 aa, Homo sapiens
QRHFY

SEQ ID NO: 3272 - protein, 5 aa, Homo sapiens
KALRH

SEQ ID NO: 3273 - protein, 5 aa, Homo sapiens
ECKQQ

SEQ ID NO: 3274 - protein, 5 aa, Homo sapiens
NFMFK

SEQ ID NO: 3275 - protein, 5 aa, Homo sapiens
RETNI

SEQ ID NO: 3276 - protein, 5 aa, Homo sapiens
KASRQ

SEQ ID NO: 3277 - protein, 5 aa, Homo sapiens
TIVLS

SEQ ID NO: 3278 - protein, 5 aa, Homo sapiens
GEYKN

SEQ ID NO: 3279 - protein, 5 aa, Homo sapiens
NAAAN

SEQ ID NO: 3280 - protein, 5 aa, Homo sapiens
LQPTS

SEQ ID NO: 3281 - protein, 5 aa, Homo sapiens
VRADM

SEQ ID NO: 3282 - protein, 5 aa, Homo sapiens
QNHMS

SEQ ID NO: 3283 - protein, 5 aa, Homo sapiens
LAVKK

SEQ ID NO: 3284 - protein, 5 aa, Homo sapiens
MLKQA

SEQ ID NO: 3285 - protein, 5 aa, Homo sapiens
SKLSK

SEQ ID NO: 3286 - protein, 5 aa, Homo sapiens
ESEDL

SEQ ID NO: 3287 - protein, 5 aa, Homo sapiens
QSMLF

SEQ ID NO: 3288 - protein, 5 aa, Homo sapiens
RHMLV

SEQ ID NO: 3289 - protein, 5 aa, Homo sapiens
MIIPR

SEQ ID NO: 3290 - protein, 5 aa, Homo sapiens
QYKKE

SEQ ID NO: 3291 - protein, 5 aa, Homo sapiens
MNNKS

SEQ ID NO: 3292 - protein, 5 aa, Homo sapiens
GADTF

SEQ ID NO: 3293 - protein, 5 aa, Homo sapiens
FWQPS

SEQ ID NO: 3294 - protein, 5 aa, Homo sapiens
GANGH

SEQ ID NO: 3295 - protein, 5 aa, Homo sapiens
IVSNT

SEQ ID NO: 3296 - protein, 5 aa, Homo sapiens
LTSKH

SEQ ID NO: 3297 - protein, 5 aa, Homo sapiens
RDIDL

SEQ ID NO: 3298 - protein, 5 aa, Homo sapiens
CCSSG

SEQ ID NO: 3299 - protein, 5 aa, Homo sapiens
HRGPV

SEQ ID NO: 3300 - protein, 5 aa, Homo sapiens
QGCGV

SEQ ID NO: 3301 - protein, 5 aa, Homo sapiens
VLDQV

SEQ ID NO: 3302 - protein, 5 aa, Homo sapiens
TVELP

SEQ ID NO: 3303 - protein, 5 aa, Homo sapiens
EPFPV

SEQ ID NO: 3304 - protein, 5 aa, Homo sapiens
ETTKN

SEQ ID NO: 3305 - protein, 5 aa, Homo sapiens
EGLYL

SEQ ID NO: 3306 - protein, 5 aa, Homo sapiens
VEATR

SEQ ID NO: 3307 - protein, 5 aa, Homo sapiens
NITVK

SEQ ID NO: 3308 - protein, 5 aa, Homo sapiens
GFHLN

SEQ ID NO: 3309 - protein, 5 aa, Homo sapiens
QLSGK

SEQ ID NO: 3310 - protein, 5 aa, Homo sapiens
ELFPA

SEQ ID NO: 3311 - protein, 5 aa, Homo sapiens
QDVTS

SEQ ID NO: 3312 - protein, 5 aa, Homo sapiens
NVVKV

SEQ ID NO: 3313 - protein, 5 aa, Homo sapiens
EHGNV

SEQ ID NO: 3314 - protein, 5 aa, Homo sapiens
VCLFE

SEQ ID NO: 3315 - protein, 5 aa, Homo sapiens
CTDSS

SEQ ID NO: 3316 - protein, 5 aa, Homo sapiens
PSDNS

SEQ ID NO: 3317 - protein, 5 aa, Homo sapiens
SDFQL

SEQ ID NO: 3318 - protein, 5 aa, Homo sapiens
SIEVD

SEQ ID NO: 3319 - protein, 5 aa, Homo sapiens
SCAIM

SEQ ID NO: 3320 - protein, 5 aa, Homo sapiens
KELFL

SEQ ID NO: 3321 - protein, 5 aa, Homo sapiens
DFRWE

SEQ ID NO: 3322 - protein, 5 aa, Homo sapiens
PGLCS

SEQ ID NO: 3323 - protein, 5 aa, Homo sapiens
DGRLR

SEQ ID NO: 3324 - protein, 5 aa, Homo sapiens
CQLDN

SEQ ID NO: 3325 - protein, 5 aa, Homo sapiens
CEPHF

SEQ ID NO: 3326 - protein, 5 aa, Homo sapiens
VQGQI

SEQ ID NO: 3327 - protein, 5 aa, Homo sapiens
AKIAA

SEQ ID NO: 3328 - protein, 5 aa, Homo sapiens
CSKLN

SEQ ID NO: 3329 - protein, 5 aa, Homo sapiens
RKCSK

SEQ ID NO: 3330 - protein, 5 aa, Homo sapiens
VWGVI

SEQ ID NO: 3331 - protein, 5 aa, Homo sapiens
LKKME

SEQ ID NO: 3332 - protein, 5 aa, Homo sapiens
AKASA

SEQ ID NO: 3333 - protein, 5 aa, Homo sapiens
NHENM

SEQ ID NO: 3334 - protein, 5 aa, Homo sapiens
LLLSN

SEQ ID NO: 3335 - protein, 5 aa, Homo sapiens
KTKDL

SEQ ID NO: 3336 - protein, 5 aa, Homo sapiens
KVMLK

SEQ ID NO: 3337 - protein, 5 aa, Homo sapiens
RHMLV

SEQ ID NO: 3338 - protein, 5 aa, Homo sapiens
EPTGD

SEQ ID NO: 3339 - protein, 5 aa, Homo sapiens
STTSV

SEQ ID NO: 3340 - protein, 5 aa, Homo sapiens
DDDDE

SEQ ID NO: 3341 - protein, 5 aa, Homo sapiens
TSHIS

SEQ ID NO: 3342 - protein, 5 aa, Homo sapiens
NTSAE

SEQ ID NO: 3343 - protein, 5 aa, Homo sapiens
DLEDL

SEQ ID NO: 3344 - protein, 5 aa, Homo sapiens
RFINK

SEQ ID NO: 3345 - protein, 5 aa, Homo sapiens
DLDDT

SEQ ID NO: 3346 - protein, 5 aa, Homo sapiens
LAERD

SEQ ID NO: 3347 - protein, 5 aa, Homo sapiens
RIQLR

SEQ ID NO: 3348 - protein, 5 aa, Homo sapiens
LKTET

SEQ ID NO: 3349 - protein, 5 aa, Homo sapiens
GIKTT

SEQ ID NO: 3350 - protein, 5 aa, Homo sapiens
FLEYE

SEQ ID NO: 3351 - protein, 5 aa, Homo sapiens
QSFPQ

SEQ ID NO: 3352 - protein, 5 aa, Homo sapiens
KYFET

SEQ ID NO: 3353 - protein, 5 aa, Homo sapiens
EKKTE

SEQ ID NO: 3354 - protein, 5 aa, Homo sapiens
YISRH

SEQ ID NO: 3355 - protein, 5 aa, Homo sapiens
ETLNF

SEQ ID NO: 3356 - protein, 5 aa, Homo sapiens
DQLAA

SEQ ID NO: 3357 - protein, 5 aa, Homo sapiens
NSTTL

SEQ ID NO: 3358 - protein, 5 aa, Homo sapiens
PQLPS

SEQ ID NO: 3359 - protein, 5 aa, Homo sapiens
KRKIT

SEQ ID NO: 3360 - protein, 5 aa, Homo sapiens
MQIDG

SEQ ID NO: 3361 - protein, 5 aa, Homo sapiens
SPGYS

SEQ ID NO: 3362 - protein, 5 aa, Homo sapiens
KRRKE

SEQ ID NO: 3363 - protein, 5 aa, Homo sapiens
DSWDF

SEQ ID NO: 3364 - protein, 5 aa, Homo sapiens
SGKTR

SEQ ID NO: 3365 - protein, 5 aa, Homo sapiens
RILLY

SEQ ID NO: 3366 - protein, 5 aa, Homo sapiens
NRKNV

SEQ ID NO: 3367 - protein, 5 aa, Homo sapiens
GSLLL

SEQ ID NO: 3368 - protein, 5 aa, Homo sapiens
ETLQM

SEQ ID NO: 3369 - protein, 5 aa, Homo sapiens
LLNSA

SEQ ID NO: 3370 - protein, 5 aa, Homo sapiens
VYHYS

SEQ ID NO: 3371 - protein, 5 aa, Homo sapiens
RRRRC

SEQ ID NO: 3372 - protein, 5 aa, Homo sapiens
QHSYS

SEQ ID NO: 3373 - protein, 5 aa, Homo sapiens
FQVNI

SEQ ID NO: 3374 - protein, 5 aa, Homo sapiens
LDDLS

SEQ ID NO: 3375 - protein, 5 aa, Homo sapiens
KSSEE

SEQ ID NO: 3376 - protein, 5 aa, Homo sapiens
SYSGG

SEQ ID NO: 3377 - protein, 5 aa, Homo sapiens
NETNS

SEQ ID NO: 3378 - protein, 5 aa, Homo sapiens
YLTGH

SEQ ID NO: 3379 - protein, 5 aa, Homo sapiens
CLSLL

SEQ ID NO: 3380 - protein, 5 aa, Homo sapiens
VPQET

SEQ ID NO: 3381 - protein, 5 aa, Homo sapiens
TDEVV

SEQ ID NO: 3382 - protein, 5 aa, Homo sapiens
LKSRQ

SEQ ID NO: 3383 - protein, 5 aa, Homo sapiens
LAMVE

SEQ ID NO: 3384 - protein, 5 aa, Homo sapiens
GPPPS

SEQ ID NO: 3385 - protein, 5 aa, Homo sapiens
NSVKL

SEQ ID NO: 3386 - protein, 5 aa, Homo sapiens
GCWHQ

SEQ ID NO: 3387 - protein, 5 aa, Homo sapiens
SLLQF

SEQ ID NO: 3388 - protein, 5 aa, Homo sapiens
GGPGA

SEQ ID NO: 3389 - protein, 5 aa, Homo sapiens
DLSAV

SEQ ID NO: 3390 - protein, 5 aa, Homo sapiens
VHFTP

SEQ ID NO: 3391 - protein, 5 aa, Homo sapiens
GTAED

SEQ ID NO: 3392 - protein, 5 aa, Homo sapiens
ETQVL

SEQ ID NO: 3393 - protein, 5 aa, Homo sapiens
SPKCD

SEQ ID NO: 3394 - protein, 5 aa, Homo sapiens
LIKKK

SEQ ID NO: 3395 - protein, 5 aa, Homo sapiens
KEFNF

SEQ ID NO: 3396 - protein, 5 aa, Homo sapiens
EVEAR

SEQ ID NO: 3397 - protein, 5 aa, Homo sapiens
QTSAS

SEQ ID NO: 3398 - protein, 5 aa, Homo sapiens
STWLR

SEQ ID NO: 3399 - protein, 5 aa, Homo sapiens
TILVE

SEQ ID NO: 3400 - protein, 5 aa, Homo sapiens
RNARS

SEQ ID NO: 3401 - protein, 5 aa, Homo sapiens
QEAKL

SEQ ID NO: 3402 - protein, 5 aa, Homo sapiens
GKVGR

SEQ ID NO: 3403 - protein, 5 aa, Homo sapiens
QTGHL

SEQ ID NO: 3404 - protein, 5 aa, Homo sapiens
AKKLT

SEQ ID NO: 3405 - protein, 5 aa, Homo sapiens
EQSAI

SEQ ID NO: 3406 - protein, 5 aa, Homo sapiens
HMSYT

SEQ ID NO: 3407 - protein, 5 aa, Homo sapiens
IIFYT

SEQ ID NO: 3408 - protein, 5 aa, Homo sapiens
QALTQ

SEQ ID NO: 3409 - protein, 5 aa, Homo sapiens
NRDSS

SEQ ID NO: 3410 - protein, 5 aa, Homo sapiens
LEWEF

SEQ ID NO: 3411 - protein, 5 aa, Homo sapiens
GPLGP

SEQ ID NO: 3412 - protein, 5 aa, Homo sapiens
EAAVW

SEQ ID NO: 3413 - protein, 5 aa, Homo sapiens
PQKNS

SEQ ID NO: 3414 - protein, 5 aa, Homo sapiens
EKEEL

SEQ ID NO: 3415 - protein, 5 aa, Homo sapiens
SLTDK

SEQ ID NO: 3416 - protein, 5 aa, Homo sapiens
DDAPL

SEQ ID NO: 3417 - protein, 5 aa, Homo sapiens
QTLQL

SEQ ID NO: 3418 - protein, 5 aa, Homo sapiens
KKLKI

SEQ ID NO: 3419 - protein, 5 aa, Homo sapiens
KIQKI

SEQ ID NO: 3420 - protein, 5 aa, Homo sapiens
AAQRD

SEQ ID NO: 3421 - protein, 5 aa, Homo sapiens
PKLPT

SEQ ID NO: 3422 - protein, 5 aa, Homo sapiens
ALLPS

SEQ ID NO: 3423 - protein, 5 aa, Homo sapiens
KREDL

SEQ ID NO: 3424 - protein, 5 aa, Homo sapiens
GDVKN

SEQ ID NO: 3425 - protein, 5 aa, Homo sapiens
RRVVL

SEQ ID NO: 3426 - protein, 5 aa, Homo sapiens
IMVLP

SEQ ID NO: 3427 - protein, 5 aa, Homo sapiens
ARVRI

SEQ ID NO: 3428 - protein, 5 aa, Homo sapiens
NLKMD

SEQ ID NO: 3429 - protein, 5 aa, Homo sapiens
CTCIF

SEQ ID NO: 3430 - protein, 5 aa, Homo sapiens
LQNTR

SEQ ID NO: 3431 - protein, 5 aa, Homo sapiens
NMKGF

SEQ ID NO: 3432 - protein, 5 aa, Homo sapiens
EDSFL

SEQ ID NO: 3433 - protein, 5 aa, Homo sapiens
EEVMF

SEQ ID NO: 3434 - protein, 5 aa, Homo sapiens
AAVAE

SEQ ID NO: 3435 - protein, 5 aa, Homo sapiens
WDMLT

SEQ ID NO: 3436 - protein, 5 aa, Homo sapiens
KRPKY

SEQ ID NO: 3437 - protein, 5 aa, Homo sapiens
ARRAQ

SEQ ID NO: 3438 - protein, 5 aa, Homo sapiens
IPLQR

SEQ ID NO: 3439 - protein, 5 aa, Homo sapiens
LINHL

SEQ ID NO: 3440 - protein, 5 aa, Homo sapiens
NSEEM

SEQ ID NO: 3441 - protein, 5 aa, Homo sapiens
FKSPY

SEQ ID NO: 3442 - protein, 5 aa, Homo sapiens
PPPPC

SEQ ID NO: 3443 - protein, 5 aa, Homo sapiens
LRVWA

SEQ ID NO: 3444 - protein, 5 aa, Homo sapiens
FLNRL

SEQ ID NO: 3445 - protein, 5 aa, Homo sapiens
VMEGS

SEQ ID NO: 3446 - protein, 5 aa, Homo sapiens
FSPRC

SEQ ID NO: 3447 - protein, 5 aa, Homo sapiens
LKHLN

SEQ ID NO: 3448 - protein, 5 aa, Homo sapiens
QIVQQ

SEQ ID NO: 3449 - protein, 5 aa, Homo sapiens
RAKHN

SEQ ID NO: 3450 - protein, 5 aa, Homo sapiens
FLGSR

SEQ ID NO: 3451 - protein, 5 aa, Homo sapiens
DMLAG

SEQ ID NO: 3452 - protein, 5 aa, Homo sapiens
QSSSP

SEQ ID NO: 3453 - protein, 5 aa, Homo sapiens
YEDFM

SEQ ID NO: 3454 - protein, 5 aa, Homo sapiens
GFLPV

SEQ ID NO: 3455 - protein, 5 aa, Homo sapiens
NQRSR

SEQ ID NO: 3456 - protein, 5 aa, Homo sapiens
SDEEH

SEQ ID NO: 3457 - protein, 5 aa, Homo sapiens
ITEAR

SEQ ID NO: 3458 - protein, 5 aa, Homo sapiens
QPLIN

SEQ ID NO: 3459 - protein, 5 aa, Homo sapiens
QNKAV

SEQ ID NO: 3460 - protein, 5 aa, Homo sapiens
SDTDY

SEQ ID NO: 3461 - protein, 5 aa, Homo sapiens
NRAKR

SEQ ID NO: 3462 - protein, 5 aa, Homo sapiens
CCQNI

SEQ ID NO: 3463 - protein, 5 aa, Homo sapiens
RSSTS

SEQ ID NO: 3464 - protein, 5 aa, Homo sapiens
CPVSV

SEQ ID NO: 3465 - protein, 5 aa, Homo sapiens
KDRSD

SEQ ID NO: 3466 - protein, 5 aa, Homo sapiens
PPLPK

SEQ ID NO: 3467 - protein, 5 aa, Homo sapiens
AITTA

SEQ ID NO: 3468 - protein, 5 aa, Homo sapiens
LPSNL

SEQ ID NO: 3469 - protein, 5 aa, Homo sapiens
GLLVH

SEQ ID NO: 3470 - protein, 5 aa, Homo sapiens
KIVQS

SEQ ID NO: 3471 - protein, 5 aa, Homo sapiens
TDNSY

SEQ ID NO: 3472 - protein, 5 aa, Homo sapiens
DLTDE

SEQ ID NO: 3473 - protein, 5 aa, Homo sapiens
DTTDL

SEQ ID NO: 3474 - protein, 5 aa, Homo sapiens
EVEWF

SEQ ID NO: 3475 - protein, 5 aa, Homo sapiens
TTLED

SEQ ID NO: 3476 - protein, 5 aa, Homo sapiens
LPGRR

SEQ ID NO: 3477 - protein, 5 aa, Homo sapiens
RSSHT

SEQ ID NO: 3478 - protein, 5 aa, Homo sapiens
IGLVK

SEQ ID NO: 3479 - protein, 5 aa, Homo sapiens
CTAKE

SEQ ID NO: 3480 - protein, 5 aa, Homo sapiens
LEDMA

SEQ ID NO: 3481 - protein, 5 aa, Homo sapiens
SDSVA

SEQ ID NO: 3482 - protein, 5 aa, Homo sapiens
NPTLL

SEQ ID NO: 3483 - protein, 5 aa, Homo sapiens
TYRGT

SEQ ID NO: 3484 - protein, 5 aa, Homo sapiens
ILDQH

SEQ ID NO: 3485 - protein, 5 aa, Homo sapiens
GKKKK

SEQ ID NO: 3486 - protein, 5 aa, Homo sapiens
EEHSS

SEQ ID NO: 3487 - protein, 5 aa, Homo sapiens
FQFNK

SEQ ID NO: 3488 - protein, 5 aa, Homo sapiens
EHKVG

SEQ ID NO: 3489 - protein, 5 aa, Homo sapiens
MPDLE

SEQ ID NO: 3490 - protein, 5 aa, Homo sapiens
EHAHL

SEQ ID NO: 3491 - protein, 5 aa, Homo sapiens
GDADM

SEQ ID NO: 3492 - protein, 5 aa, Homo sapiens
TKSKR

SEQ ID NO: 3493 - protein, 5 aa, Homo sapiens
SNKSV

SEQ ID NO: 3494 - protein, 5 aa, Homo sapiens
LGTRR

SEQ ID NO: 3495 - protein, 5 aa, Homo sapiens
EDYAE

SEQ ID NO: 3496 - protein, 5 aa, Homo sapiens
PFTFE

SEQ ID NO: 3497 - protein, 5 aa, Homo sapiens
WSLLR

SEQ ID NO: 3498 - protein, 5 aa, Homo sapiens
FMRHL

SEQ ID NO: 3499 - protein, 5 aa, Homo sapiens
PSAFL

SEQ ID NO: 3500 - protein, 5 aa, Homo sapiens
EEPAL

SEQ ID NO: 3501 - protein, 5 aa, Homo sapiens
GTTAD

SEQ ID NO: 3502 - protein, 5 aa, Homo sapiens
VRRRK

SEQ ID NO: 3503 - protein, 5 aa, Homo sapiens
PPERD

SEQ ID NO: 3504 - protein, 5 aa, Homo sapiens
QSVLC

SEQ ID NO: 3505 - protein, 5 aa, Homo sapiens
KKCIC

SEQ ID NO: 3506 - protein, 5 aa, Homo sapiens
TCTKA

SEQ ID NO: 3507 - protein, 5 aa, Homo sapiens
MENET

SEQ ID NO: 3508 - protein, 5 aa, Homo sapiens
VTCTL

SEQ ID NO: 3509 - protein, 5 aa, Homo sapiens
SISPR

SEQ ID NO: 3510 - protein, 5 aa, Homo sapiens
EFNDM

SEQ ID NO: 3511 - protein, 5 aa, Homo sapiens
TVRLL

SEQ ID NO: 3512 - protein, 5 aa, Homo sapiens
EKSSD

SEQ ID NO: 3513 - protein, 5 aa, Homo sapiens
SAAGQ

SEQ ID NO: 3514 - protein, 5 aa, Homo sapiens
MNCMF

SEQ ID NO: 3515 - protein, 5 aa, Homo sapiens
ELTPI

SEQ ID NO: 3516 - protein, 5 aa, Homo sapiens
YRSVL

SEQ ID NO: 3517 - protein, 5 aa, Homo sapiens
DRGSH

SEQ ID NO: 3518 - protein, 5 aa, Homo sapiens
DKKDD

SEQ ID NO: 3519 - protein, 5 aa, Homo sapiens
RTTPV

SEQ ID NO: 3520 - protein, 5 aa, Homo sapiens
KTKQS

SEQ ID NO: 3521 - protein, 5 aa, Homo sapiens
NVSDS

SEQ ID NO: 3522 - protein, 5 aa, Homo sapiens
VQSNN

SEQ ID NO: 3523 - protein, 5 aa, Homo sapiens
IFNSR

SEQ ID NO: 3524 - protein, 5 aa, Homo sapiens
CSSMS

SEQ ID NO: 3525 - protein, 5 aa, Homo sapiens
IISLD

SEQ ID NO: 3526 - protein, 5 aa, Homo sapiens
FEKQQ

SEQ ID NO: 3527 - protein, 5 aa, Homo sapiens
TKGNH

SEQ ID NO: 3528 - protein, 5 aa, Homo sapiens
ETSVI

SEQ ID NO: 3529 - protein, 5 aa, Homo sapiens
SDPGS

SEQ ID NO: 3530 - protein, 5 aa, Homo sapiens
SCSVM

SEQ ID NO: 3531 - protein, 5 aa, Homo sapiens
VVRNT

SEQ ID NO: 3532 - protein, 5 aa, Homo sapiens
RKWMN

SEQ ID NO: 3533 - protein, 5 aa, Homo sapiens
SLRKD

SEQ ID NO: 3534 - protein, 5 aa, Homo sapiens
FEYEP

SEQ ID NO: 3535 - protein, 5 aa, Homo sapiens
VFAVV

SEQ ID NO: 3536 - protein, 5 aa, Homo sapiens
HHLEP

SEQ ID NO: 3537 - protein, 5 aa, Homo sapiens
EDLFL

SEQ ID NO: 3538 - protein, 5 aa, Homo sapiens
KEKSS

SEQ ID NO: 3539 - protein, 5 aa, Homo sapiens
GINKQ

SEQ ID NO: 3540 - protein, 5 aa, Homo sapiens
VALLH

SEQ ID NO: 3541 - protein, 5 aa, Homo sapiens
VRRVV

SEQ ID NO: 3542 - protein, 5 aa, Homo sapiens
LDIST

SEQ ID NO: 3543 - protein, 5 aa, Homo sapiens
CGWAR

SEQ ID NO: 3544 - protein, 5 aa, Homo sapiens
AKNNQ

SEQ ID NO: 3545 - protein, 5 aa, Homo sapiens
YASAS

SEQ ID NO: 3546 - protein, 5 aa, Homo sapiens
SRMCH

SEQ ID NO: 3547 - protein, 5 aa, Homo sapiens
GFTKQ

SEQ ID NO: 3548 - protein, 5 aa, Homo sapiens
EVRTQ

SEQ ID NO: 3549 - protein, 5 aa, Homo sapiens
LPVPS

SEQ ID NO: 3550 - protein, 5 aa, Homo sapiens
PLHGR

SEQ ID NO: 3551 - protein, 5 aa, Homo sapiens
VTQQE

SEQ ID NO: 3552 - protein, 5 aa, Homo sapiens
ASVKN

SEQ ID NO: 3553 - protein, 5 aa, Homo sapiens
EEKTK

SEQ ID NO: 3554 - protein, 5 aa, Homo sapiens
FDEQN

SEQ ID NO: 3555 - protein, 5 aa, Homo sapiens
ENSGR

SEQ ID NO: 3556 - protein, 5 aa, Homo sapiens
TLDPT

SEQ ID NO: 3557 - protein, 5 aa, Homo sapiens
LPGPL

SEQ ID NO: 3558 - protein, 5 aa, Homo sapiens
PACLP

SEQ ID NO: 3559 - protein, 5 aa, Homo sapiens
HPSST

SEQ ID NO: 3560 - protein, 5 aa, Homo sapiens
ILEVK

SEQ ID NO: 3561 - protein, 5 aa, Homo sapiens
PRWGL

SEQ ID NO: 3562 - protein, 5 aa, Homo sapiens
QALLP

SEQ ID NO: 3563 - protein, 5 aa, Homo sapiens
DAQLH

SEQ ID NO: 3564 - protein, 5 aa, Homo sapiens
PPASP

SEQ ID NO: 3565 - protein, 5 aa, Homo sapiens
VEKVD

SEQ ID NO: 3566 - protein, 5 aa, Homo sapiens
LFKKS

SEQ ID NO: 3567 - protein, 5 aa, Homo sapiens
DSLML

SEQ ID NO: 3568 - protein, 5 aa, Homo sapiens
QTSQF

SEQ ID NO: 3569 - protein, 5 aa, Homo sapiens
HYHEN

SEQ ID NO: 3570 - protein, 5 aa, Homo sapiens
LNLTL

SEQ ID NO: 3571 - protein, 5 aa, Homo sapiens
PAVVN

SEQ ID NO: 3572 - protein, 5 aa, Homo sapiens
ELTPL

SEQ ID NO: 3573 - protein, 5 aa, Homo sapiens
LVMDT

SEQ ID NO: 3574 - protein, 5 aa, Homo sapiens
KMFTS

SEQ ID NO: 3575 - protein, 5 aa, Homo sapiens
VPRKL

SEQ ID NO: 3576 - protein, 5 aa, Homo sapiens
SQHAQ

SEQ ID NO: 3577 - protein, 5 aa, Homo sapiens
AMVLD

SEQ ID NO: 3578 - protein, 5 aa, Homo sapiens
PLVWE

SEQ ID NO: 3579 - protein, 5 aa, Homo sapiens
LSYRI

SEQ ID NO: 3580 - protein, 5 aa, Homo sapiens
RKILS

SEQ ID NO: 3581 - protein, 5 aa, Homo sapiens
FPQSP

SEQ ID NO: 3582 - protein, 5 aa, Homo sapiens
PWESL

SEQ ID NO: 3583 - protein, 5 aa, Homo sapiens
DEEGE

SEQ ID NO: 3584 - protein, 5 aa, Homo sapiens
LNYPM

SEQ ID NO: 3585 - protein, 5 aa, Homo sapiens
AFRRR

SEQ ID NO: 3586 - protein, 5 aa, Homo sapiens
VAMPV

SEQ ID NO: 3587 - protein, 5 aa, Homo sapiens
RPTHR

SEQ ID NO: 3588 - protein, 5 aa, Homo sapiens
FAVRQ

SEQ ID NO: 3589 - protein, 5 aa, Homo sapiens
KPCVM

SEQ ID NO: 3590 - protein, 5 aa, Homo sapiens
DAQTE

SEQ ID NO: 3591 - protein, 5 aa, Homo sapiens
HPEDV

SEQ ID NO: 3592 - protein, 5 aa, Homo sapiens
KNSKL

SEQ ID NO: 3593 - protein, 5 aa, Homo sapiens
LSSTS

SEQ ID NO: 3594 - protein, 5 aa, Homo sapiens
EKRSQ

SEQ ID NO: 3595 - protein, 5 aa, Homo sapiens
LLLQI

SEQ ID NO: 3596 - protein, 5 aa, Homo sapiens
ESTAL

SEQ ID NO: 3597 - protein, 5 aa, Homo sapiens
PMYVD

SEQ ID NO: 3598 - protein, 5 aa, Homo sapiens
YVTDI

SEQ ID NO: 3599 - protein, 5 aa, Homo sapiens
DRDEL

SEQ ID NO: 3600 - protein, 5 aa, Homo sapiens
NKTKP

SEQ ID NO: 3601 - protein, 5 aa, Homo sapiens
EHILS

SEQ ID NO: 3602 - protein, 5 aa, Homo sapiens
LTFYS

SEQ ID NO: 3603 - protein, 5 aa, Homo sapiens
GEIKL

SEQ ID NO: 3604 - protein, 5 aa, Homo sapiens
QIQLY

SEQ ID NO: 3605 - protein, 5 aa, Homo sapiens
QLPET

SEQ ID NO: 3606 - protein, 5 aa, Homo sapiens
PVILV

SEQ ID NO: 3607 - protein, 5 aa, Homo sapiens
FESVP

SEQ ID NO: 3608 - protein, 5 aa, Homo sapiens
EAREY

SEQ ID NO: 3609 - protein, 5 aa, Homo sapiens
GCGLY

SEQ ID NO: 3610 - protein, 5 aa, Homo sapiens
NKAKQ

SEQ ID NO: 3611 - protein, 5 aa, Homo sapiens
AQGCT

SEQ ID NO: 3612 - protein, 5 aa, Homo sapiens
TFYCQ

SEQ ID NO: 3613 - protein, 5 aa, Homo sapiens
LTAAR

SEQ ID NO: 3614 - protein, 5 aa, Homo sapiens
LNQRR

SEQ ID NO: 3615 - protein, 5 aa, Homo sapiens
APWGT

SEQ ID NO: 3616 - protein, 5 aa, Homo sapiens
RGSLN

SEQ ID NO: 3617 - protein, 5 aa, Homo sapiens
PGVSL

SEQ ID NO: 3618 - protein, 5 aa, Homo sapiens
FVCSL

SEQ ID NO: 3619 - protein, 5 aa, Homo sapiens
MLDPS

SEQ ID NO: 3620 - protein, 5 aa, Homo sapiens
VSSAC

SEQ ID NO: 3621 - protein, 5 aa, Homo sapiens
ILNKN

SEQ ID NO: 3622 - protein, 5 aa, Homo sapiens
IGSYF

SEQ ID NO: 3623 - protein, 5 aa, Homo sapiens
QAVLL

SEQ ID NO: 3624 - protein, 5 aa, Homo sapiens
CKNFC

SEQ ID NO: 3625 - protein, 5 aa, Homo sapiens
LEKGG

SEQ ID NO: 3626 - protein, 5 aa, Homo sapiens
IKPRL

SEQ ID NO: 3627 - protein, 5 aa, Homo sapiens
SQEPH

SEQ ID NO: 3628 - protein, 5 aa, Homo sapiens
QEKEN

SEQ ID NO: 3629 - protein, 5 aa, Homo sapiens
IWKGE

SEQ ID NO: 3630 - protein, 5 aa, Homo sapiens
YRSEH

SEQ ID NO: 3631 - protein, 5 aa, Homo sapiens
LYSCY

SEQ ID NO: 3632 - protein, 5 aa, Homo sapiens
DVATK

SEQ ID NO: 3633 - protein, 5 aa, Homo sapiens
LFSNL

SEQ ID NO: 3634 - protein, 5 aa, Homo sapiens
FADLY

SEQ ID NO: 3635 - protein, 5 aa, Homo sapiens
QELYY

SEQ ID NO: 3636 - protein, 5 aa, Homo sapiens
EIRVK

SEQ ID NO: 3637 - protein, 5 aa, Homo sapiens
LQTHV

SEQ ID NO: 3638 - protein, 5 aa, Homo sapiens
MVTQL

SEQ ID NO: 3639 - protein, 5 aa, Homo sapiens
RPYYK

SEQ ID NO: 3640 - protein, 5 aa, Homo sapiens
SSSTT

SEQ ID NO: 3641 - protein, 5 aa, Homo sapiens
VQVAE

SEQ ID NO: 3642 - protein, 5 aa, Homo sapiens
KLGLR

SEQ ID NO: 3643 - protein, 5 aa, Homo sapiens
LHRAA

SEQ ID NO: 3644 - protein, 5 aa, Homo sapiens
TSLFL

SEQ ID NO: 3645 - protein, 5 aa, Homo sapiens
GPEMA

SEQ ID NO: 3646 - protein, 5 aa, Homo sapiens
KTGHK

SEQ ID NO: 3647 - protein, 5 aa, Homo sapiens
SPERY

SEQ ID NO: 3648 - protein, 5 aa, Homo sapiens
GFGQE

SEQ ID NO: 3649 - protein, 5 aa, Homo sapiens
YQQQP

SEQ ID NO: 3650 - protein, 5 aa, Homo sapiens
ATNLQ

SEQ ID NO: 3651 - protein, 5 aa, Homo sapiens
VVFVK

SEQ ID NO: 3652 - protein, 5 aa, Homo sapiens
RGGRR

SEQ ID NO: 3653 - protein, 5 aa, Homo sapiens
PANYI

SEQ ID NO: 3654 - protein, 5 aa, Homo sapiens
FLNWE

SEQ ID NO: 3655 - protein, 5 aa, Homo sapiens
SSAEK

SEQ ID NO: 3656 - protein, 5 aa, Homo sapiens
PAPLW

SEQ ID NO: 3657 - protein, 5 aa, Homo sapiens
YDTPL

SEQ ID NO: 3658 - protein, 5 aa, Homo sapiens
SEYWF

SEQ ID NO: 3659 - protein, 5 aa, Homo sapiens
RAFLQ

SEQ ID NO: 3660 - protein, 5 aa, Homo sapiens
YRDMY

SEQ ID NO: 3661 - protein, 5 aa, Homo sapiens
DSEKP

SEQ ID NO: 3662 - protein, 5 aa, Homo sapiens
PSLCR

SEQ ID NO: 3663 - protein, 5 aa, Homo sapiens
FSKQK

SEQ ID NO: 3664 - protein, 5 aa, Homo sapiens
TSTGL

SEQ ID NO: 3665 - protein, 5 aa, Homo sapiens
IKNFF

SEQ ID NO: 3666 - protein, 5 aa, Homo sapiens
NTSER

SEQ ID NO: 3667 - protein, 5 aa, Homo sapiens
DIEDP

SEQ ID NO: 3668 - protein, 5 aa, Homo sapiens
SSGVD

SEQ ID NO: 3669 - protein, 5 aa, Homo sapiens
HQEPS

SEQ ID NO: 3670 - protein, 5 aa, Homo sapiens
QLDGS

SEQ ID NO: 3671 - protein, 5 aa, Homo sapiens
FNAPK

SEQ ID NO: 3672 - protein, 5 aa, Homo sapiens
LQAWP

SEQ ID NO: 3673 - protein, 5 aa, Homo sapiens
PTGRD

SEQ ID NO: 3674 - protein, 5 aa, Homo sapiens
YAPSA

SEQ ID NO: 3675 - protein, 5 aa, Homo sapiens
DLTKL

SEQ ID NO: 3676 - protein, 5 aa, Homo sapiens
PLSAP

SEQ ID NO: 3677 - protein, 5 aa, Homo sapiens
PGEVC

SEQ ID NO: 3678 - protein, 5 aa, Homo sapiens
VTTRL

SEQ ID NO: 3679 - protein, 5 aa, Homo sapiens
MKTCH

SEQ ID NO: 3680 - protein, 5 aa, Homo sapiens
YNHYS

SEQ ID NO: 3681 - protein, 5 aa, Homo sapiens
IFKNF

SEQ ID NO: 3682 - protein, 5 aa, Homo sapiens
CLLMR

SEQ ID NO: 3683 - protein, 5 aa, Homo sapiens
IDKKS

SEQ ID NO: 3684 - protein, 5 aa, Homo sapiens
DVVYK

SEQ ID NO: 3685 - protein, 5 aa, Homo sapiens
SLDDA

SEQ ID NO: 3686 - protein, 5 aa, Homo sapiens
PKHKE

SEQ ID NO: 3687 - protein, 5 aa, Homo sapiens
KDDPM

SEQ ID NO: 3688 - protein, 5 aa, Homo sapiens
KNCSS

SEQ ID NO: 3689 - protein, 5 aa, Homo sapiens
VVPQA

SEQ ID NO: 3690 - protein, 5 aa, Homo sapiens
SQQSK

SEQ ID NO: 3691 - protein, 5 aa, Homo sapiens
LEPAP

SEQ ID NO: 3692 - protein, 5 aa, Homo sapiens
NDLEL

SEQ ID NO: 3693 - protein, 5 aa, Homo sapiens
FLNDT

SEQ ID NO: 3694 - protein, 5 aa, Homo sapiens
ITNGS

SEQ ID NO: 3695 - protein, 5 aa, Homo sapiens
GYTMA

SEQ ID NO: 3696 - protein, 5 aa, Homo sapiens
DFMCS

SEQ ID NO: 3697 - protein, 5 aa, Homo sapiens
LSSGI

SEQ ID NO: 3698 - protein, 5 aa, Homo sapiens
STNMD

SEQ ID NO: 3699 - protein, 5 aa, Homo sapiens
PGTCI

SEQ ID NO: 3700 - protein, 5 aa, Homo sapiens
DREDL

SEQ ID NO: 3701 - protein, 5 aa, Homo sapiens
LELQT

SEQ ID NO: 3702 - protein, 5 aa, Homo sapiens
GLRIM

SEQ ID NO: 3703 - protein, 5 aa, Homo sapiens
FKKDN

SEQ ID NO: 3704 - protein, 5 aa, Homo sapiens
SRTEL

SEQ ID NO: 3705 - protein, 5 aa, Homo sapiens
TRTAV

SEQ ID NO: 3706 - protein, 5 aa, Homo sapiens
ARDHL

SEQ ID NO: 3707 - protein, 5 aa, Homo sapiens
YEVVY

SEQ ID NO: 3708 - protein, 5 aa, Homo sapiens
EINLL

SEQ ID NO: 3709 - protein, 5 aa, Homo sapiens
GEGLV

SEQ ID NO: 3710 - protein, 5 aa, Homo sapiens
LKQGS

SEQ ID NO: 3711 - protein, 5 aa, Homo sapiens
PATDL

SEQ ID NO: 3712 - protein, 5 aa, Homo sapiens
RTAAA

SEQ ID NO: 3713 - protein, 5 aa, Homo sapiens
LVPAC

SEQ ID NO: 3714 - protein, 5 aa, Homo sapiens
SVTLL

SEQ ID NO: 3715 - protein, 5 aa, Homo sapiens
EEQEN

SEQ ID NO: 3716 - protein, 5 aa, Homo sapiens
GKADT

SEQ ID NO: 3717 - protein, 5 aa, Homo sapiens
AKSVK

SEQ ID NO: 3718 - protein, 5 aa, Homo sapiens
SAMSG

SEQ ID NO: 3719 - protein, 5 aa, Homo sapiens
MDCAT

SEQ ID NO: 3720 - protein, 5 aa, Homo sapiens
TCIHY

SEQ ID NO: 3721 - protein, 5 aa, Homo sapiens
VLEAP

SEQ ID NO: 3722 - protein, 5 aa, Homo sapiens
AQMEE

SEQ ID NO: 3723 - protein, 5 aa, Homo sapiens
PVCAS

SEQ ID NO: 3724 - protein, 5 aa, Homo sapiens
QKLGL

SEQ ID NO: 3725 - protein, 5 aa, Homo sapiens
AKTFA

SEQ ID NO: 3726 - protein, 5 aa, Homo sapiens
MDCII

SEQ ID NO: 3727 - protein, 5 aa, Homo sapiens
YASRR

SEQ ID NO: 3728 - protein, 5 aa, Homo sapiens
SNSIY

SEQ ID NO: 3729 - protein, 5 aa, Homo sapiens
TLEYG

SEQ ID NO: 3730 - protein, 5 aa, Homo sapiens
AMEVT

SEQ ID NO: 3731 - protein, 5 aa, Homo sapiens
RPPEP

SEQ ID NO: 3732 - protein, 5 aa, Homo sapiens
WAQVG

SEQ ID NO: 3733 - protein, 5 aa, Homo sapiens
RCCLH

SEQ ID NO: 3734 - protein, 5 aa, Homo sapiens
APLAP

SEQ ID NO: 3735 - protein, 5 aa, Homo sapiens
DQFAE

SEQ ID NO: 3736 - protein, 5 aa, Homo sapiens
LEEEN

SEQ ID NO: 3737 - protein, 5 aa, Homo sapiens
LEVWT

SEQ ID NO: 3738 - protein, 5 aa, Homo sapiens
LVAVN

SEQ ID NO: 3739 - protein, 5 aa, Homo sapiens
GTWRL

SEQ ID NO: 3740 - protein, 5 aa, Homo sapiens
AETVL

SEQ ID NO: 3741 - protein, 5 aa, Homo sapiens
QVSSL

SEQ ID NO: 3742 - protein, 5 aa, Homo sapiens
EEAGY

SEQ ID NO: 3743 - protein, 5 aa, Homo sapiens
LVAES

SEQ ID NO: 3744 - protein, 5 aa, Homo sapiens
IDMAK

SEQ ID NO: 3745 - protein, 5 aa, Homo sapiens
SLGCC

SEQ ID NO: 3746 - protein, 5 aa, Homo sapiens
DYMDI

SEQ ID NO: 3747 - protein, 5 aa, Homo sapiens
ERLIS

SEQ ID NO: 3748 - protein, 5 aa, Homo sapiens
FSDEY

SEQ ID NO: 3749 - protein, 5 aa, Homo sapiens
LLQEK

SEQ ID NO: 3750 - protein, 5 aa, Homo sapiens
PKSPQ

SEQ ID NO: 3751 - protein, 5 aa, Homo sapiens
RVDYS

SEQ ID NO: 3752 - protein, 5 aa, Homo sapiens
EMQNA

SEQ ID NO: 3753 - protein, 5 aa, Homo sapiens
SLFLI

SEQ ID NO: 3754 - protein, 5 aa, Homo sapiens
GKKVI

SEQ ID NO: 3755 - protein, 5 aa, Homo sapiens
KGNLR

SEQ ID NO: 3756 - protein, 5 aa, Homo sapiens
VENGN

SEQ ID NO: 3757 - protein, 5 aa, Homo sapiens
EKTEE

SEQ ID NO: 3758 - protein, 5 aa, Homo sapiens
LNTVV

SEQ ID NO: 3759 - protein, 5 aa, Homo sapiens
FDGHE

SEQ ID NO: 3760 - protein, 5 aa, Homo sapiens
ISLLS

SEQ ID NO: 3761 - protein, 5 aa, Homo sapiens
CLSAA

SEQ ID NO: 3762 - protein, 5 aa, Homo sapiens
VDSWV

SEQ ID NO: 3763 - protein, 5 aa, Homo sapiens
ILRDK

SEQ ID NO: 3764 - protein, 5 aa, Homo sapiens
CTVDV

SEQ ID NO: 3765 - protein, 5 aa, Homo sapiens
APPRS

SEQ ID NO: 3766 - protein, 5 aa, Homo sapiens
GNEES

SEQ ID NO: 3767 - protein, 5 aa, Homo sapiens
FSNQM

SEQ ID NO: 3768 - protein, 5 aa, Homo sapiens
FGVMS

SEQ ID NO: 3769 - protein, 5 aa, Homo sapiens
RQFSH

SEQ ID NO: 3770 - protein, 5 aa, Homo sapiens
ATTGE

SEQ ID NO: 3771 - protein, 5 aa, Homo sapiens
DRYGS

SEQ ID NO: 3772 - protein, 5 aa, Homo sapiens
VEAIQ

SEQ ID NO: 3773 - protein, 5 aa, Homo sapiens
TLDIH

SEQ ID NO: 3774 - protein, 5 aa, Homo sapiens
RAHQH

SEQ ID NO: 3775 - protein, 5 aa, Homo sapiens
PNGQS

SEQ ID NO: 3776 - protein, 5 aa, Homo sapiens
PQKVG

SEQ ID NO: 3777 - protein, 5 aa, Homo sapiens
GPLAK

SEQ ID NO: 3778 - protein, 5 aa, Homo sapiens
LQSSF

SEQ ID NO: 3779 - protein, 5 aa, Homo sapiens
LGGQP

SEQ ID NO: 3780 - protein, 5 aa, Homo sapiens
LESEV

SEQ ID NO: 3781 - protein, 5 aa, Homo sapiens
LQSLE

SEQ ID NO: 3782 - protein, 5 aa, Homo sapiens
VPQHL

SEQ ID NO: 3783 - protein, 5 aa, Homo sapiens
PEDTY

SEQ ID NO: 3784 - protein, 5 aa, Homo sapiens
KGSAE

SEQ ID NO: 3785 - protein, 5 aa, Homo sapiens
PDIPS

SEQ ID NO: 3786 - protein, 5 aa, Homo sapiens
LESYC

SEQ ID NO: 3787 - protein, 5 aa, Homo sapiens
RTLTR

SEQ ID NO: 3788 - protein, 5 aa, Homo sapiens
LDMRS

SEQ ID NO: 3789 - protein, 5 aa, Homo sapiens
YENFT

SEQ ID NO: 3790 - protein, 5 aa, Homo sapiens
FHSTC

SEQ ID NO: 3791 - protein, 5 aa, Homo sapiens
ADVDH

SEQ ID NO: 3792 - protein, 5 aa, Homo sapiens
HRLVF

SEQ ID NO: 3793 - protein, 5 aa, Homo sapiens
FSIGH

SEQ ID NO: 3794 - protein, 5 aa, Homo sapiens
KESFS

SEQ ID NO: 3795 - protein, 5 aa, Homo sapiens
YQSHL

SEQ ID NO: 3796 - protein, 5 aa, Homo sapiens
SEVSD

SEQ ID NO: 3797 - protein, 5 aa, Homo sapiens
KLDVV

SEQ ID NO: 3798 - protein, 5 aa, Homo sapiens
AFDHL

SEQ ID NO: 3799 - protein, 5 aa, Homo sapiens
LENQA

SEQ ID NO: 3800 - protein, 5 aa, Homo sapiens
QFVSS

SEQ ID NO: 3801 - protein, 5 aa, Homo sapiens
EGEWD

SEQ ID NO: 3802 - protein, 5 aa, Homo sapiens
EEDLR

SEQ ID NO: 3803 - protein, 5 aa, Homo sapiens
GTSTQ

SEQ ID NO: 3804 - protein, 5 aa, Homo sapiens
SHQYQ

SEQ ID NO: 3805 - protein, 5 aa, Homo sapiens
DFYCQ

SEQ ID NO: 3806 - protein, 5 aa, Homo sapiens
GLAQS

SEQ ID NO: 3807 - protein, 5 aa, Homo sapiens
ASIPR

SEQ ID NO: 3808 - protein, 5 aa, Homo sapiens
SGRRK

SEQ ID NO: 3809 - protein, 5 aa, Homo sapiens
EENLF

SEQ ID NO: 3810 - protein, 5 aa, Homo sapiens
GGGAP

SEQ ID NO: 3811 - protein, 5 aa, Homo sapiens
PQVLA

SEQ ID NO: 3812 - protein, 5 aa, Homo sapiens
SMDCI

SEQ ID NO: 3813 - protein, 5 aa, Homo sapiens
GSIAV

SEQ ID NO: 3814 - protein, 5 aa, Homo sapiens
VSWTK

SEQ ID NO: 3815 - protein, 5 aa, Homo sapiens
RQVLA

SEQ ID NO: 3816 - protein, 5 aa, Homo sapiens
YVCLD

SEQ ID NO: 3817 - protein, 5 aa, Homo sapiens
AVASK

SEQ ID NO: 3818 - protein, 5 aa, Homo sapiens
IYDND

SEQ ID NO: 3819 - protein, 5 aa, Homo sapiens
FPNEK

SEQ ID NO: 3820 - protein, 5 aa, Homo sapiens
NKPND

SEQ ID NO: 3821 - protein, 5 aa, Homo sapiens
GKCLA

SEQ ID NO: 3822 - protein, 5 aa, Homo sapiens
PVPVM

SEQ ID NO: 3823 - protein, 5 aa, Homo sapiens
SKLSK

SEQ ID NO: 3824 - protein, 5 aa, Homo sapiens
HDFMI

SEQ ID NO: 3825 - protein, 5 aa, Homo sapiens
QKKIS

SEQ ID NO: 3826 - protein, 5 aa, Homo sapiens
ITNID

SEQ ID NO: 3827 - protein, 5 aa, Homo sapiens
EPIEE

SEQ ID NO: 3828 - protein, 5 aa, Homo sapiens
RTFLS

SEQ ID NO: 3829 - protein, 5 aa, Homo sapiens
CRDKR

SEQ ID NO: 3830 - protein, 5 aa, Homo sapiens
PVFGA

SEQ ID NO: 3831 - protein, 5 aa, Homo sapiens
GCRSS

SEQ ID NO: 3832 - protein, 5 aa, Homo sapiens
LFPVP

SEQ ID NO: 3833 - protein, 5 aa, Homo sapiens
VETSL

SEQ ID NO: 3834 - protein, 5 aa, Homo sapiens
QSLQF

SEQ ID NO: 3835 - protein, 5 aa, Homo sapiens
KNSSC

SEQ ID NO: 3836 - protein, 5 aa, Homo sapiens
FSSRQ

SEQ ID NO: 3837 - protein, 5 aa, Homo sapiens
QYPYI

SEQ ID NO: 3838 - protein, 5 aa, Homo sapiens
LSELE

SEQ ID NO: 3839 - protein, 5 aa, Homo sapiens
EQPEM

SEQ ID NO: 3840 - protein, 5 aa, Homo sapiens
PEDLL

SEQ ID NO: 3841 - protein, 5 aa, Homo sapiens
NFEVI

SEQ ID NO: 3842 - protein, 5 aa, Homo sapiens
EQMQI

SEQ ID NO: 3843 - protein, 5 aa, Homo sapiens
EKIDY

SEQ ID NO: 3844 - protein, 5 aa, Homo sapiens
ENNII

SEQ ID NO: 3845 - protein, 5 aa, Homo sapiens
EAQQS

SEQ ID NO: 3846 - protein, 5 aa, Homo sapiens
SNVAK

SEQ ID NO: 3847 - protein, 5 aa, Homo sapiens
SPGSD

SEQ ID NO: 3848 - protein, 5 aa, Homo sapiens
AAQPR

SEQ ID NO: 3849 - protein, 5 aa, Homo sapiens
NNSLP

SEQ ID NO: 3850 - protein, 5 aa, Homo sapiens
ASRTH

SEQ ID NO: 3851 - protein, 5 aa, Homo sapiens
WDPGF

SEQ ID NO: 3852 - protein, 5 aa, Homo sapiens
IESNV

SEQ ID NO: 3853 - protein, 5 aa, Homo sapiens
PSFHD

SEQ ID NO: 3854 - protein, 5 aa, Homo sapiens
TVVFK

SEQ ID NO: 3855 - protein, 5 aa, Homo sapiens
LKTDC

SEQ ID NO: 3856 - protein, 5 aa, Homo sapiens
FSDED

SEQ ID NO: 3857 - protein, 5 aa, Homo sapiens
NHILK

SEQ ID NO: 3858 - protein, 5 aa, Homo sapiens
KESFL

SEQ ID NO: 3859 - protein, 5 aa, Homo sapiens
SADRF

SEQ ID NO: 3860 - protein, 5 aa, Homo sapiens
KVRRH

SEQ ID NO: 3861 - protein, 5 aa, Homo sapiens
SVTTV

SEQ ID NO: 3862 - protein, 5 aa, Homo sapiens
DITKT

SEQ ID NO: 3863 - protein, 5 aa, Homo sapiens
ERKIK

SEQ ID NO: 3864 - protein, 5 aa, Homo sapiens
LLWRV

SEQ ID NO: 3865 - protein, 5 aa, Homo sapiens
FFQRK

SEQ ID NO: 3866 - protein, 5 aa, Homo sapiens
FDPSP

SEQ ID NO: 3867 - protein, 5 aa, Homo sapiens
MGEIQ

SEQ ID NO: 3868 - protein, 5 aa, Homo sapiens
MEQRE

SEQ ID NO: 3869 - protein, 5 aa, Homo sapiens
QILTM

SEQ ID NO: 3870 - protein, 5 aa, Homo sapiens
LKCGL

SEQ ID NO: 3871 - protein, 5 aa, Homo sapiens
TSTNK

SEQ ID NO: 3872 - protein, 5 aa, Homo sapiens
VSTHS

SEQ ID NO: 3873 - protein, 5 aa, Homo sapiens
LTTEL

SEQ ID NO: 3874 - protein, 5 aa, Homo sapiens
TNIEN

SEQ ID NO: 3875 - protein, 5 aa, Homo sapiens
LSTTI

SEQ ID NO: 3876 - protein, 5 aa, Homo sapiens
DHPPF

SEQ ID NO: 3877 - protein, 5 aa, Homo sapiens
PLSHL

SEQ ID NO: 3878 - protein, 5 aa, Homo sapiens
LDQAT

SEQ ID NO: 3879 - protein, 5 aa, Homo sapiens
RELNA

SEQ ID NO: 3880 - protein, 5 aa, Homo sapiens
LIRVL

SEQ ID NO: 3881 - protein, 5 aa, Homo sapiens
HICLR

SEQ ID NO: 3882 - protein, 5 aa, Homo sapiens
GLIDK

SEQ ID NO: 3883 - protein, 5 aa, Homo sapiens
PSKDA

SEQ ID NO: 3884 - protein, 5 aa, Homo sapiens
GLCGG

SEQ ID NO: 3885 - protein, 5 aa, Homo sapiens
MAPNT

SEQ ID NO: 3886 - protein, 5 aa, Homo sapiens
KPDAK

SEQ ID NO: 3887 - protein, 5 aa, Homo sapiens
SDQRR

SEQ ID NO: 3888 - protein, 5 aa, Homo sapiens
ALGVD

SEQ ID NO: 3889 - protein, 5 aa, Homo sapiens
YRILF

SEQ ID NO: 3890 - protein, 5 aa, Homo sapiens
NEKSC

SEQ ID NO: 3891 - protein, 5 aa, Homo sapiens
PHSSC

SEQ ID NO: 3892 - protein, 5 aa, Homo sapiens
PTYRS

SEQ ID NO: 3893 - protein, 5 aa, Homo sapiens
SKLSR

SEQ ID NO: 3894 - protein, 5 aa, Homo sapiens
SKIDS

SEQ ID NO: 3895 - protein, 5 aa, Homo sapiens
SFAQH

SEQ ID NO: 3896 - protein, 5 aa, Homo sapiens
VAATQ

SEQ ID NO: 3897 - protein, 5 aa, Homo sapiens
EDSEV

SEQ ID NO: 3898 - protein, 5 aa, Homo sapiens
GSPIS

SEQ ID NO: 3899 - protein, 5 aa, Homo sapiens
ASGRE

SEQ ID NO: 3900 - protein, 5 aa, Homo sapiens
KLFPL

SEQ ID NO: 3901 - protein, 5 aa, Homo sapiens
HQLKA

SEQ ID NO: 3902 - protein, 5 aa, Homo sapiens
CPDIF

SEQ ID NO: 3903 - protein, 5 aa, Homo sapiens
RRMIL

SEQ ID NO: 3904 - protein, 5 aa, Homo sapiens
GTKEH

SEQ ID NO: 3905 - protein, 5 aa, Homo sapiens
ATLRS

SEQ ID NO: 3906 - protein, 5 aa, Homo sapiens
KQPLR

SEQ ID NO: 3907 - protein, 5 aa, Homo sapiens
TGAFS

SEQ ID NO: 3908 - protein, 5 aa, Homo sapiens
FKDWK

SEQ ID NO: 3909 - protein, 5 aa, Homo sapiens
HENSY

SEQ ID NO: 3910 - protein, 5 aa, Homo sapiens
SCTVM

SEQ ID NO: 3911 - protein, 5 aa, Homo sapiens
MPKLK

SEQ ID NO: 3912 - protein, 5 aa, Homo sapiens
QQPLL

SEQ ID NO: 3913 - protein, 5 aa, Homo sapiens
ARIAL

SEQ ID NO: 3914 - protein, 5 aa, Homo sapiens
AKVFV

SEQ ID NO: 3915 - protein, 5 aa, Homo sapiens
IFRPD

SEQ ID NO: 3916 - protein, 5 aa, Homo sapiens
SSPPV

SEQ ID NO: 3917 - protein, 5 aa, Homo sapiens
PGTFL

SEQ ID NO: 3918 - protein, 5 aa, Homo sapiens
AASGK

SEQ ID NO: 3919 - protein, 5 aa, Homo sapiens
FTSRF

SEQ ID NO: 3920 - protein, 5 aa, Homo sapiens
HKMLS

SEQ ID NO: 3921 - protein, 5 aa, Homo sapiens
SDLLC

SEQ ID NO: 3922 - protein, 5 aa, Homo sapiens
TYCSI

SEQ ID NO: 3923 - protein, 5 aa, Homo sapiens
EVHHT

SEQ ID NO: 3924 - protein, 5 aa, Homo sapiens
FNLDP

SEQ ID NO: 3925 - protein, 5 aa, Homo sapiens
LHLRK

SEQ ID NO: 3926 - protein, 5 aa, Homo sapiens
RRIPS

SEQ ID NO: 3927 - protein, 5 aa, Homo sapiens
QHALN

SEQ ID NO: 3928 - protein, 5 aa, Homo sapiens
SNEES

SEQ ID NO: 3929 - protein, 5 aa, Homo sapiens
KTTKK

SEQ ID NO: 3930 - protein, 5 aa, Homo sapiens
FPKGQ

SEQ ID NO: 3931 - protein, 5 aa, Homo sapiens
KKLSL

SEQ ID NO: 3932 - protein, 5 aa, Homo sapiens
KCVLQ

SEQ ID NO: 3933 - protein, 5 aa, Homo sapiens
DLDSD

SEQ ID NO: 3934 - protein, 5 aa, Homo sapiens
PPPPE

SEQ ID NO: 3935 - protein, 5 aa, Homo sapiens
ASPSP

SEQ ID NO: 3936 - protein, 5 aa, Homo sapiens
SMMDR

SEQ ID NO: 3937 - protein, 5 aa, Homo sapiens
GGEDD

SEQ ID NO: 3938 - protein, 5 aa, Homo sapiens
EDEKP

SEQ ID NO: 3939 - protein, 5 aa, Homo sapiens
TLTFS

SEQ ID NO: 3940 - protein, 5 aa, Homo sapiens
KEWYV

SEQ ID NO: 3941 - protein, 5 aa, Homo sapiens
FTKTE

SEQ ID NO: 3942 - protein, 5 aa, Homo sapiens
SLLPW

SEQ ID NO: 3943 - protein, 5 aa, Homo sapiens
LGSRK

SEQ ID NO: 3944 - protein, 5 aa, Homo sapiens
AHVAT

SEQ ID NO: 3945 - protein, 5 aa, Homo sapiens
IDLRH

SEQ ID NO: 3946 - protein, 5 aa, Homo sapiens
SGTTS

SEQ ID NO: 3947 - protein, 5 aa, Homo sapiens
RPRWR

SEQ ID NO: 3948 - protein, 5 aa, Homo sapiens
RGKEE

SEQ ID NO: 3949 - protein, 5 aa, Homo sapiens
EDNLQ

SEQ ID NO: 3950 - protein, 5 aa, Homo sapiens
SRNRQ

SEQ ID NO: 3951 - protein, 5 aa, Homo sapiens
PAVEA

SEQ ID NO: 3952 - protein, 5 aa, Homo sapiens
ANFNT

SEQ ID NO: 3953 - protein, 5 aa, Homo sapiens
NKDEL

SEQ ID NO: 3954 - protein, 5 aa, Homo sapiens
EEEVA

SEQ ID NO: 3955 - protein, 5 aa, Homo sapiens
APLHS

SEQ ID NO: 3956 - protein, 5 aa, Homo sapiens
NKSHK

SEQ ID NO: 3957 - protein, 5 aa, Homo sapiens
SLLVN

SEQ ID NO: 3958 - protein, 5 aa, Homo sapiens
GRELL

SEQ ID NO: 3959 - protein, 5 aa, Homo sapiens
PQPPE

SEQ ID NO: 3960 - protein, 5 aa, Homo sapiens
GSKDR

SEQ ID NO: 3961 - protein, 5 aa, Homo sapiens
FVKNL

SEQ ID NO: 3962 - protein, 5 aa, Homo sapiens
SNQII

SEQ ID NO: 3963 - protein, 5 aa, Homo sapiens
NESYS

SEQ ID NO: 3964 - protein, 5 aa, Homo sapiens
RLAQE

SEQ ID NO: 3965 - protein, 5 aa, Homo sapiens
QPSGS

SEQ ID NO: 3966 - protein, 5 aa, Homo sapiens
PRLNL

SEQ ID NO: 3967 - protein, 5 aa, Homo sapiens
GVTQK

SEQ ID NO: 3968 - protein, 5 aa, Homo sapiens
ALEQQ

SEQ ID NO: 3969 - protein, 5 aa, Homo sapiens
LKMEI

SEQ ID NO: 3970 - protein, 5 aa, Homo sapiens
YLLED

SEQ ID NO: 3971 - protein, 5 aa, Homo sapiens
QGMNM

SEQ ID NO: 3972 - protein, 5 aa, Homo sapiens
DTSFF

SEQ ID NO: 3973 - protein, 5 aa, Homo sapiens
FLVKK

SEQ ID NO: 3974 - protein, 5 aa, Homo sapiens
RASSQ

SEQ ID NO: 3975 - protein, 5 aa, Homo sapiens
KRLTP

SEQ ID NO: 3976 - protein, 5 aa, Homo sapiens
PVSSF

SEQ ID NO: 3977 - protein, 5 aa, Homo sapiens
NRNLL

SEQ ID NO: 3978 - protein, 5 aa, Homo sapiens
SLSWL

SEQ ID NO: 3979 - protein, 5 aa, Homo sapiens
AETKN

SEQ ID NO: 3980 - protein, 5 aa, Homo sapiens
LQHSR

SEQ ID NO: 3981 - protein, 5 aa, Homo sapiens
SVECR

SEQ ID NO: 3982 - protein, 5 aa, Homo sapiens
CIEQK

SEQ ID NO: 3983 - protein, 5 aa, Homo sapiens
EESRF

SEQ ID NO: 3984 - protein, 5 aa, Homo sapiens
RDWVR

SEQ ID NO: 3985 - protein, 5 aa, Homo sapiens
PLYNS

SEQ ID NO: 3986 - protein, 5 aa, Homo sapiens
ESEDN

SEQ ID NO: 3987 - protein, 5 aa, Homo sapiens
SAGFI

SEQ ID NO: 3988 - protein, 5 aa, Homo sapiens
VELEW

SEQ ID NO: 3989 - protein, 5 aa, Homo sapiens
RECNL

SEQ ID NO: 3990 - protein, 5 aa, Homo sapiens
LPFLF

SEQ ID NO: 3991 - protein, 5 aa, Homo sapiens
PQIIK

SEQ ID NO: 3992 - protein, 5 aa, Homo sapiens
GKINV

SEQ ID NO: 3993 - protein, 5 aa, Homo sapiens
HTPEL

SEQ ID NO: 3994 - protein, 5 aa, Homo sapiens
SRIEY

SEQ ID NO: 3995 - protein, 5 aa, Homo sapiens
KQDKD

SEQ ID NO: 3996 - protein, 5 aa, Homo sapiens
GRQIE

SEQ ID NO: 3997 - protein, 5 aa, Homo sapiens
SVRPV

SEQ ID NO: 3998 - protein, 5 aa, Homo sapiens
DFLLN

SEQ ID NO: 3999 - protein, 5 aa, Homo sapiens
DSEGD

SEQ ID NO: 4000 - protein, 5 aa, Homo sapiens
DSDDD

SEQ ID NO: 4001 - protein, 5 aa, Homo sapiens
TLTTG

SEQ ID NO: 4002 - protein, 5 aa, Homo sapiens
NVDEN

SEQ ID NO: 4003 - protein, 5 aa, Homo sapiens
QPKEW

SEQ ID NO: 4004 - protein, 5 aa, Homo sapiens
GKAKN

SEQ ID NO: 4005 - protein, 5 aa, Homo sapiens
EVQLE

SEQ ID NO: 4006 - protein, 5 aa, Homo sapiens
FSHTE

SEQ ID NO: 4007 - protein, 5 aa, Homo sapiens
REKLN

SEQ ID NO: 4008 - protein, 5 aa, Homo sapiens
RENED

SEQ ID NO: 4009 - protein, 5 aa, Homo sapiens
DTWDE

SEQ ID NO: 4010 - protein, 5 aa, Homo sapiens
KDGCY

SEQ ID NO: 4011 - protein, 5 aa, Homo sapiens
IAETW

SEQ ID NO: 4012 - protein, 5 aa, Homo sapiens
SESLM

SEQ ID NO: 4013 - protein, 5 aa, Homo sapiens
VSTGF

SEQ ID NO: 4014 - protein, 5 aa, Homo sapiens
VDLPN

SEQ ID NO: 4015 - protein, 5 aa, Homo sapiens
FAMFN

SEQ ID NO: 4016 - protein, 5 aa, Homo sapiens
EDENQ

SEQ ID NO: 4017 - protein, 5 aa, Homo sapiens
DSKSM

SEQ ID NO: 4018 - protein, 5 aa, Homo sapiens
GFSLA

SEQ ID NO: 4019 - protein, 5 aa, Homo sapiens
MLTQS

SEQ ID NO: 4020 - protein, 5 aa, Homo sapiens
NRGFG

SEQ ID NO: 4021 - protein, 5 aa, Homo sapiens
ESVKI

SEQ ID NO: 4022 - protein, 5 aa, Homo sapiens
RKRIC

SEQ ID NO: 4023 - protein, 5 aa, Homo sapiens
LQKVR

SEQ ID NO: 4024 - protein, 5 aa, Homo sapiens
VIDFS

SEQ ID NO: 4025 - protein, 5 aa, Homo sapiens
QQGPI

SEQ ID NO: 4026 - protein, 5 aa, Homo sapiens
LGLNC

SEQ ID NO: 4027 - protein, 5 aa, Homo sapiens
SCVGL

SEQ ID NO: 4028 - protein, 5 aa, Homo sapiens
EINWS

SEQ ID NO: 4029 - protein, 5 aa, Homo sapiens
WFQGN

SEQ ID NO: 4030 - protein, 5 aa, Homo sapiens
AQMAQ

SEQ ID NO: 4031 - protein, 5 aa, Homo sapiens
WDKDF

SEQ ID NO: 4032 - protein, 5 aa, Homo sapiens
NGSLS

SEQ ID NO: 4033 - protein, 5 aa, Homo sapiens
TLVLK

SEQ ID NO: 4034 - protein, 5 aa, Homo sapiens
YTYVA

SEQ ID NO: 4035 - protein, 5 aa, Homo sapiens
HQNQD

SEQ ID NO: 4036 - protein, 5 aa, Homo sapiens
ESVKI

SEQ ID NO: 4037 - protein, 5 aa, Homo sapiens
WSIYL

SEQ ID NO: 4038 - protein, 5 aa, Homo sapiens
QVSAV

SEQ ID NO: 4039 - protein, 5 aa, Homo sapiens
RIEEC

SEQ ID NO: 4040 - protein, 5 aa, Homo sapiens
AQILL

SEQ ID NO: 4041 - protein, 5 aa, Homo sapiens
TITFP

SEQ ID NO: 4042 - protein, 5 aa, Homo sapiens
EKVES

SEQ ID NO: 4043 - protein, 5 aa, Homo sapiens
LKTEL

SEQ ID NO: 4044 - protein, 5 aa, Homo sapiens
ACLGL

SEQ ID NO: 4045 - protein, 5 aa, Homo sapiens
ERSSR

SEQ ID NO: 4046 - protein, 5 aa, Homo sapiens
KVPWD

SEQ ID NO: 4047 - protein, 5 aa, Homo sapiens
DLEIL

SEQ ID NO: 4048 - protein, 5 aa, Homo sapiens
APTVP

SEQ ID NO: 4049 - protein, 5 aa, Homo sapiens
SDCGV

SEQ ID NO: 4050 - protein, 5 aa, Homo sapiens
SDKDS

SEQ ID NO: 4051 - protein, 5 aa, Homo sapiens
ELTGF

SEQ ID NO: 4052 - protein, 5 aa, Homo sapiens
RHTSC

SEQ ID NO: 4053 - protein, 5 aa, Homo sapiens
VHAIA

SEQ ID NO: 4054 - protein, 5 aa, Homo sapiens
NGKSN

SEQ ID NO: 4055 - protein, 5 aa, Homo sapiens
GSEDS

SEQ ID NO: 4056 - protein, 5 aa, Homo sapiens
MSAKS

SEQ ID NO: 4057 - protein, 5 aa, Homo sapiens
FFDAA

SEQ ID NO: 4058 - protein, 5 aa, Homo sapiens
DKEEH

SEQ ID NO: 4059 - protein, 5 aa, Homo sapiens
ISELL

SEQ ID NO: 4060 - protein, 5 aa, Homo sapiens
ATGFY

SEQ ID NO: 4061 - protein, 5 aa, Homo sapiens
PGTLV

SEQ ID NO: 4062 - protein, 5 aa, Homo sapiens
ALRRL

SEQ ID NO: 4063 - protein, 5 aa, Homo sapiens
TGRSA

SEQ ID NO: 4064 - protein, 5 aa, Homo sapiens
VSREP

SEQ ID NO: 4065 - protein, 5 aa, Homo sapiens
QGAEG

SEQ ID NO: 4066 - protein, 5 aa, Homo sapiens
LKTRL

SEQ ID NO: 4067 - protein, 5 aa, Homo sapiens
QDIKL

SEQ ID NO: 4068 - protein, 5 aa, Homo sapiens
KVDCI

SEQ ID NO: 4069 - protein, 5 aa, Homo sapiens
IIPGC

SEQ ID NO: 4070 - protein, 5 aa, Homo sapiens
ITKSY

SEQ ID NO: 4071 - protein, 5 aa, Homo sapiens
KCCAH

SEQ ID NO: 4072 - protein, 5 aa, Homo sapiens
VAHQS

SEQ ID NO: 4073 - protein, 5 aa, Homo sapiens
EEPPL

SEQ ID NO: 4074 - protein, 5 aa, Homo sapiens
FLLHE

SEQ ID NO: 4075 - protein, 5 aa, Homo sapiens
DTKSG

SEQ ID NO: 4076 - protein, 5 aa, Homo sapiens
QFVCK

SEQ ID NO: 4077 - protein, 5 aa, Homo sapiens
NAASP

SEQ ID NO: 4078 - protein, 5 aa, Homo sapiens
ESRSE

SEQ ID NO: 4079 - protein, 5 aa, Homo sapiens
DDSFP

SEQ ID NO: 4080 - protein, 5 aa, Homo sapiens
PSTAN

SEQ ID NO: 4081 - protein, 5 aa, Homo sapiens
EANSQ

SEQ ID NO: 4082 - protein, 5 aa, Homo sapiens
SRGSS

SEQ ID NO: 4083 - protein, 5 aa, Homo sapiens
ETDVL

SEQ ID NO: 4084 - protein, 5 aa, Homo sapiens
GKFEE

SEQ ID NO: 4085 - protein, 5 aa, Homo sapiens
EVKVK

SEQ ID NO: 4086 - protein, 5 aa, Homo sapiens
ATSPM

SEQ ID NO: 4087 - protein, 5 aa, Homo sapiens
CCIIL

SEQ ID NO: 4088 - protein, 5 aa, Homo sapiens
SSISF

SEQ ID NO: 4089 - protein, 5 aa, Homo sapiens
SDTFH

SEQ ID NO: 4090 - protein, 5 aa, Homo sapiens
ESYQK

SEQ ID NO: 4091 - protein, 5 aa, Homo sapiens
MVVHS

SEQ ID NO: 4092 - protein, 5 aa, Homo sapiens
QDIWS

SEQ ID NO: 4093 - protein, 5 aa, Homo sapiens
HWLQE

SEQ ID NO: 4094 - protein, 5 aa, Homo sapiens
VHPPR

SEQ ID NO: 4095 - protein, 5 aa, Homo sapiens
SISHV

SEQ ID NO: 4096 - protein, 5 aa, Homo sapiens
DLDSL

SEQ ID NO: 4097 - protein, 5 aa, Homo sapiens
RPNMI

SEQ ID NO: 4098 - protein, 5 aa, Homo sapiens
MQSPA

SEQ ID NO: 4099 - protein, 5 aa, Homo sapiens
KTQAV

SEQ ID NO: 4100 - protein, 5 aa, Homo sapiens
KAGQV

SEQ ID NO: 4101 - protein, 5 aa, Homo sapiens
NTIDV

SEQ ID NO: 4102 - protein, 5 aa, Homo sapiens
VLGRF

SEQ ID NO: 4103 - protein, 5 aa, Homo sapiens
YKKGE

SEQ ID NO: 4104 - protein, 5 aa, Homo sapiens
YFACV

SEQ ID NO: 4105 - protein, 5 aa, Homo sapiens
KSKCC

SEQ ID NO: 4106 - protein, 5 aa, Homo sapiens
LKNIK

SEQ ID NO: 4107 - protein, 5 aa, Homo sapiens
VADHE

SEQ ID NO: 4108 - protein, 5 aa, Homo sapiens
KAKRD

SEQ ID NO: 4109 - protein, 5 aa, Homo sapiens
TLLAL

SEQ ID NO: 4110 - protein, 5 aa, Homo sapiens
EPDVQ

SEQ ID NO: 4111 - protein, 5 aa, Homo sapiens
KRNNK

SEQ ID NO: 4112 - protein, 5 aa, Homo sapiens
NQDST

SEQ ID NO: 4113 - protein, 5 aa, Homo sapiens
KEEGE

SEQ ID NO: 4114 - protein, 5 aa, Homo sapiens
VDTRV

SEQ ID NO: 4115 - protein, 5 aa, Homo sapiens
RAKYY

SEQ ID NO: 4116 - protein, 5 aa, Homo sapiens
VQKNQ

SEQ ID NO: 4117 - protein, 5 aa, Homo sapiens
IHYQC

SEQ ID NO: 4118 - protein, 5 aa, Homo sapiens
VTEGK

SEQ ID NO: 4119 - protein, 5 aa, Homo sapiens
KKSDS

SEQ ID NO: 4120 - protein, 5 aa, Homo sapiens
LPAPC

SEQ ID NO: 4121 - protein, 5 aa, Homo sapiens
DDDDV

SEQ ID NO: 4122 - protein, 5 aa, Homo sapiens
INGRP

SEQ ID NO: 4123 - protein, 5 aa, Homo sapiens
LLYRT

SEQ ID NO: 4124 - protein, 5 aa, Homo sapiens
GVADS

SEQ ID NO: 4125 - protein, 5 aa, Homo sapiens
VFSVC

SEQ ID NO: 4126 - protein, 5 aa, Homo sapiens
NVMTC

SEQ ID NO: 4127 - protein, 5 aa, Homo sapiens
SPEVR

SEQ ID NO: 4128 - protein, 5 aa, Homo sapiens
VCFSS

SEQ ID NO: 4129 - protein, 5 aa, Homo sapiens
QATPP

SEQ ID NO: 4130 - protein, 5 aa, Homo sapiens
TSGDP

SEQ ID NO: 4131 - protein, 5 aa, Homo sapiens
MKRHL

SEQ ID NO: 4132 - protein, 5 aa, Homo sapiens
PCIRS

SEQ ID NO: 4133 - protein, 5 aa, Homo sapiens
LLLYE

SEQ ID NO: 4134 - protein, 5 aa, Homo sapiens
FFSSW

SEQ ID NO: 4135 - protein, 5 aa, Homo sapiens
FATVT

SEQ ID NO: 4136 - protein, 5 aa, Homo sapiens
RSLRR

SEQ ID NO: 4137 - protein, 5 aa, Homo sapiens
PEPRG

SEQ ID NO: 4138 - protein, 5 aa, Homo sapiens
RRPSM

SEQ ID NO: 4139 - protein, 5 aa, Homo sapiens
TKKGK

SEQ ID NO: 4140 - protein, 5 aa, Homo sapiens
GGVFS

SEQ ID NO: 4141 - protein, 5 aa, Homo sapiens
NASFT

SEQ ID NO: 4142 - protein, 5 aa, Homo sapiens
PLIRT

SEQ ID NO: 4143 - protein, 5 aa, Homo sapiens
LPNRR

SEQ ID NO: 4144 - protein, 5 aa, Homo sapiens
DLDHI

SEQ ID NO: 4145 - protein, 5 aa, Homo sapiens
CGGDD

SEQ ID NO: 4146 - protein, 5 aa, Homo sapiens
WGPWM

SEQ ID NO: 4147 - protein, 5 aa, Homo sapiens
LPSDS

SEQ ID NO: 4148 - protein, 5 aa, Homo sapiens
KRNRN

SEQ ID NO: 4149 - protein, 5 aa, Homo sapiens
ITIYS

SEQ ID NO: 4150 - protein, 5 aa, Homo sapiens
AIRSY

SEQ ID NO: 4151 - protein, 5 aa, Homo sapiens
GCQAC

SEQ ID NO: 4152 - protein, 5 aa, Homo sapiens
ESTHM

SEQ ID NO: 4153 - protein, 5 aa, Homo sapiens
SKPSE

SEQ ID NO: 4154 - protein, 5 aa, Homo sapiens
VCLLL

SEQ ID NO: 4155 - protein, 5 aa, Homo sapiens
VVKEA

SEQ ID NO: 4156 - protein, 5 aa, Homo sapiens
RRSNL

SEQ ID NO: 4157 - protein, 5 aa, Homo sapiens
KKATN

SEQ ID NO: 4158 - protein, 5 aa, Homo sapiens
EAACA

SEQ ID NO: 4159 - protein, 5 aa, Homo sapiens
SVDEE

SEQ ID NO: 4160 - protein, 5 aa, Homo sapiens
KVLSY

SEQ ID NO: 4161 - protein, 5 aa, Homo sapiens
ASNIE

SEQ ID NO: 4162 - protein, 5 aa, Homo sapiens
HSQYN

SEQ ID NO: 4163 - protein, 5 aa, Homo sapiens
SITFA

SEQ ID NO: 4164 - protein, 5 aa, Homo sapiens
TFRRP

SEQ ID NO: 4165 - protein, 5 aa, Homo sapiens
NIHSV

SEQ ID NO: 4166 - protein, 5 aa, Homo sapiens
VLRDL

SEQ ID NO: 4167 - protein, 5 aa, Homo sapiens
PSWYF

SEQ ID NO: 4168 - protein, 5 aa, Homo sapiens
RPSHN

SEQ ID NO: 4169 - protein, 5 aa, Homo sapiens
KYFSF

SEQ ID NO: 4170 - protein, 5 aa, Homo sapiens
SRSKD

SEQ ID NO: 4171 - protein, 5 aa, Homo sapiens
TDGLS

SEQ ID NO: 4172 - protein, 5 aa, Homo sapiens
SSATW

SEQ ID NO: 4173 - protein, 5 aa, Homo sapiens
GLQGY

SEQ ID NO: 4174 - protein, 5 aa, Homo sapiens
LVLPP

SEQ ID NO: 4175 - protein, 5 aa, Homo sapiens
RSFRM

SEQ ID NO: 4176 - protein, 5 aa, Homo sapiens
SDEEG

SEQ ID NO: 4177 - protein, 5 aa, Homo sapiens
STGSK

SEQ ID NO: 4178 - protein, 5 aa, Homo sapiens
LLVSC

SEQ ID NO: 4179 - protein, 5 aa, Homo sapiens
TASPP

SEQ ID NO: 4180 - protein, 5 aa, Homo sapiens
ILQQF

SEQ ID NO: 4181 - protein, 5 aa, Homo sapiens
WPERP

SEQ ID NO: 4182 - protein, 5 aa, Homo sapiens
DYDNF

SEQ ID NO: 4183 - protein, 5 aa, Homo sapiens
AAFTK

SEQ ID NO: 4184 - protein, 5 aa, Homo sapiens
SDKDS

SEQ ID NO: 4185 - protein, 5 aa, Homo sapiens
AVRKL

SEQ ID NO: 4186 - protein, 5 aa, Homo sapiens
HFSVA

SEQ ID NO: 4187 - protein, 5 aa, Homo sapiens
QESRR

SEQ ID NO: 4188 - protein, 5 aa, Homo sapiens
PRLPA

SEQ ID NO: 4189 - protein, 5 aa, Homo sapiens
TSLLH

SEQ ID NO: 4190 - protein, 5 aa, Homo sapiens
SFRWN

SEQ ID NO: 4191 - protein, 5 aa, Homo sapiens
SDIRR

SEQ ID NO: 4192 - protein, 5 aa, Homo sapiens
KYHWP

SEQ ID NO: 4193 - protein, 5 aa, Homo sapiens
LPNDS

SEQ ID NO: 4194 - protein, 5 aa, Homo sapiens
EKMQE

SEQ ID NO: 4195 - protein, 5 aa, Homo sapiens
LCDVK

SEQ ID NO: 4196 - protein, 5 aa, Homo sapiens
KKRKI

SEQ ID NO: 4197 - protein, 5 aa, Homo sapiens
QSQKK

SEQ ID NO: 4198 - protein, 5 aa, Homo sapiens
AEEEF

SEQ ID NO: 4199 - protein, 5 aa, Homo sapiens
SETKM

SEQ ID NO: 4200 - protein, 5 aa, Homo sapiens
RRKRA

SEQ ID NO: 4201 - protein, 5 aa, Homo sapiens
LRFSN

SEQ ID NO: 4202 - protein, 5 aa, Homo sapiens
SCPSR

SEQ ID NO: 4203 - protein, 5 aa, Homo sapiens
KHEEL

SEQ ID NO: 4204 - protein, 5 aa, Homo sapiens
VMEFS

SEQ ID NO: 4205 - protein, 5 aa, Homo sapiens
ECKTQ

SEQ ID NO: 4206 - protein, 5 aa, Homo sapiens
IQSLK

SEQ ID NO: 4207 - protein, 5 aa, Homo sapiens
LLESG

SEQ ID NO: 4208 - protein, 5 aa, Homo sapiens
FPKSN

SEQ ID NO: 4209 - protein, 5 aa, Homo sapiens
TAAYI

SEQ ID NO: 4210 - protein, 5 aa, Homo sapiens
FYKYK

SEQ ID NO: 4211 - protein, 5 aa, Homo sapiens
MELTQ

SEQ ID NO: 4212 - protein, 5 aa, Homo sapiens
SLEKA

SEQ ID NO: 4213 - protein, 5 aa, Homo sapiens
QQICK

SEQ ID NO: 4214 - protein, 5 aa, Homo sapiens
VEEPY

SEQ ID NO: 4215 - protein, 5 aa, Homo sapiens
KYGNI

SEQ ID NO: 4216 - protein, 5 aa, Homo sapiens
KGKDI

SEQ ID NO: 4217 - protein, 5 aa, Homo sapiens
LKELR

SEQ ID NO: 4218 - protein, 5 aa, Homo sapiens
VENSI

SEQ ID NO: 4219 - protein, 5 aa, Homo sapiens
LESLV

SEQ ID NO: 4220 - protein, 5 aa, Homo sapiens
RGKKK

SEQ ID NO: 4221 - protein, 5 aa, Homo sapiens
KHLDM

SEQ ID NO: 4222 - protein, 5 aa, Homo sapiens
HDQDN

SEQ ID NO: 4223 - protein, 5 aa, Homo sapiens
NLTQD

SEQ ID NO: 4224 - protein, 5 aa, Homo sapiens
RSWRR

SEQ ID NO: 4225 - protein, 5 aa, Homo sapiens
SFVVL

SEQ ID NO: 4226 - protein, 5 aa, Homo sapiens
YYMYF

SEQ ID NO: 4227 - protein, 5 aa, Homo sapiens
QCPQQ

SEQ ID NO: 4228 - protein, 5 aa, Homo sapiens
FDHLR

SEQ ID NO: 4229 - protein, 5 aa, Homo sapiens
SDPIL

SEQ ID NO: 4230 - protein, 5 aa, Homo sapiens
TKEKE

SEQ ID NO: 4231 - protein, 5 aa, Homo sapiens
EKNAK

SEQ ID NO: 4232 - protein, 5 aa, Homo sapiens
EVYHF

SEQ ID NO: 4233 - protein, 5 aa, Homo sapiens
QTMER

SEQ ID NO: 4234 - protein, 5 aa, Homo sapiens
EKAKL

SEQ ID NO: 4235 - protein, 5 aa, Homo sapiens
LEFQA

SEQ ID NO: 4236 - protein, 5 aa, Homo sapiens
RFFFW

SEQ ID NO: 4237 - protein, 5 aa, Homo sapiens
GFNVH

SEQ ID NO: 4238 - protein, 5 aa, Homo sapiens
SWNDS

SEQ ID NO: 4239 - protein, 5 aa, Homo sapiens
CQYNS

SEQ ID NO: 4240 - protein, 5 aa, Homo sapiens
WVGEV

SEQ ID NO: 4241 - protein, 5 aa, Homo sapiens
AKLIS

SEQ ID NO: 4242 - protein, 5 aa, Homo sapiens
NDFQD

SEQ ID NO: 4243 - protein, 5 aa, Homo sapiens
FSTFR

SEQ ID NO: 4244 - protein, 5 aa, Homo sapiens
VAGIR

SEQ ID NO: 4245 - protein, 5 aa, Homo sapiens
TIFEP

SEQ ID NO: 4246 - protein, 5 aa, Homo sapiens
STKSE

SEQ ID NO: 4247 - protein, 5 aa, Homo sapiens
APRSV

SEQ ID NO: 4248 - protein, 5 aa, Homo sapiens
TYSEA

SEQ ID NO: 4249 - protein, 5 aa, Homo sapiens
QPVYI

SEQ ID NO: 4250 - protein, 5 aa, Homo sapiens
DPYVG

SEQ ID NO: 4251 - protein, 5 aa, Homo sapiens
EEETF

SEQ ID NO: 4252 - protein, 5 aa, Homo sapiens
KGKRD

SEQ ID NO: 4253 - protein, 5 aa, Homo sapiens
NPHIA

SEQ ID NO: 4254 - protein, 5 aa, Homo sapiens
SSLLN

SEQ ID NO: 4255 - protein, 5 aa, Homo sapiens
KDRSE

SEQ ID NO: 4256 - protein, 5 aa, Homo sapiens
TRLCF

SEQ ID NO: 4257 - protein, 5 aa, Homo sapiens
GFGQE

SEQ ID NO: 4258 - protein, 5 aa, Homo sapiens
CAGDN

SEQ ID NO: 4259 - protein, 5 aa, Homo sapiens
LKRRR

SEQ ID NO: 4260 - protein, 5 aa, Homo sapiens
QHFQN

SEQ ID NO: 4261 - protein, 5 aa, Homo sapiens
DGDEL

SEQ ID NO: 4262 - protein, 5 aa, Homo sapiens
WTTAT

SEQ ID NO: 4263 - protein, 5 aa, Homo sapiens
CGGND

SEQ ID NO: 4264 - protein, 5 aa, Homo sapiens
AGHHF

SEQ ID NO: 4265 - protein, 5 aa, Homo sapiens
KEYYV

SEQ ID NO: 4266 - protein, 5 aa, Homo sapiens
IISQL

SEQ ID NO: 4267 - protein, 5 aa, Homo sapiens
QVVRI

SEQ ID NO: 4268 - protein, 5 aa, Homo sapiens
PAIEV

SEQ ID NO: 4269 - protein, 5 aa, Homo sapiens
LRRQF

SEQ ID NO: 4270 - protein, 5 aa, Homo sapiens
RNGLE

SEQ ID NO: 4271 - protein, 5 aa, Homo sapiens
TILIF

SEQ ID NO: 4272 - protein, 5 aa, Homo sapiens
SSGWF

SEQ ID NO: 4273 - protein, 5 aa, Homo sapiens
CCSRK

SEQ ID NO: 4274 - protein, 5 aa, Homo sapiens
LAVMQ

SEQ ID NO: 4275 - protein, 5 aa, Homo sapiens
QAHRK

SEQ ID NO: 4276 - protein, 5 aa, Homo sapiens
FLVQD

SEQ ID NO: 4277 - protein, 5 aa, Homo sapiens
GCLVL

SEQ ID NO: 4278 - protein, 5 aa, Homo sapiens
SMDTN

SEQ ID NO: 4279 - protein, 5 aa, Homo sapiens
TLNKT

SEQ ID NO: 4280 - protein, 5 aa, Homo sapiens
GNLGQ

SEQ ID NO: 4281 - protein, 5 aa, Homo sapiens
VGFLG

SEQ ID NO: 4282 - protein, 5 aa, Homo sapiens
LEKLD

SEQ ID NO: 4283 - protein, 5 aa, Homo sapiens
MNKPV

SEQ ID NO: 4284 - protein, 5 aa, Homo sapiens
ELLNA

SEQ ID NO: 4285 - protein, 5 aa, Homo sapiens
YFPSG

SEQ ID NO: 4286 - protein, 5 aa, Homo sapiens
DDKCQ

SEQ ID NO: 4287 - protein, 5 aa, Homo sapiens
KRESE

SEQ ID NO: 4288 - protein, 5 aa, Homo sapiens
GYQRI

SEQ ID NO: 4289 - protein, 5 aa, Homo sapiens
FYTSA

SEQ ID NO: 4290 - protein, 5 aa, Homo sapiens
ITVKH

SEQ ID NO: 4291 - protein, 5 aa, Homo sapiens
FLQKF

SEQ ID NO: 4292 - protein, 5 aa, Homo sapiens
KEQTN

SEQ ID NO: 4293 - protein, 5 aa, Homo sapiens
GKIAL

SEQ ID NO: 4294 - protein, 5 aa, Homo sapiens
LYCEL

SEQ ID NO: 4295 - protein, 5 aa, Homo sapiens
RLLDL

SEQ ID NO: 4296 - protein, 5 aa, Homo sapiens
SNSKK

SEQ ID NO: 4297 - protein, 5 aa, Homo sapiens
DIERS

SEQ ID NO: 4298 - protein, 5 aa, Homo sapiens
CSRLF

SEQ ID NO: 4299 - protein, 5 aa, Homo sapiens
AATDD

SEQ ID NO: 4300 - protein, 5 aa, Homo sapiens
RKLGV

SEQ ID NO: 4301 - protein, 5 aa, Homo sapiens
DDVGH

SEQ ID NO: 4302 - protein, 5 aa, Homo sapiens
SEPKG

SEQ ID NO: 4303 - protein, 5 aa, Homo sapiens
PYMRR

SEQ ID NO: 4304 - protein, 5 aa, Homo sapiens
RTLAS

SEQ ID NO: 4305 - protein, 5 aa, Homo sapiens
VEPTA

SEQ ID NO: 4306 - protein, 5 aa, Homo sapiens
DHYGI

SEQ ID NO: 4307 - protein, 5 aa, Homo sapiens
GTQNL

SEQ ID NO: 4308 - protein, 5 aa, Homo sapiens
GTKRQ

SEQ ID NO: 4309 - protein, 5 aa, Homo sapiens
WETSI

SEQ ID NO: 4310 - protein, 5 aa, Homo sapiens
TFTGF

SEQ ID NO: 4311 - protein, 5 aa, Homo sapiens
QRRRI

SEQ ID NO: 4312 - protein, 5 aa, Homo sapiens
ELNTA

SEQ ID NO: 4313 - protein, 5 aa, Homo sapiens
QVHLV

SEQ ID NO: 4314 - protein, 5 aa, Homo sapiens
QKEQE

SEQ ID NO: 4315 - protein, 5 aa, Homo sapiens
RKPRF

SEQ ID NO: 4316 - protein, 5 aa, Homo sapiens
SNPKA

SEQ ID NO: 4317 - protein, 5 aa, Homo sapiens
GTDDE

SEQ ID NO: 4318 - protein, 5 aa, Homo sapiens
KKAKP

SEQ ID NO: 4319 - protein, 5 aa, Homo sapiens
IATEI

SEQ ID NO: 4320 - protein, 5 aa, Homo sapiens
GPLPP

SEQ ID NO: 4321 - protein, 5 aa, Homo sapiens
LELFE

SEQ ID NO: 4322 - protein, 5 aa, Homo sapiens
CIWEF

SEQ ID NO: 4323 - protein, 5 aa, Homo sapiens
SKALV

SEQ ID NO: 4324 - protein, 5 aa, Homo sapiens
HSAVL

SEQ ID NO: 4325 - protein, 5 aa, Homo sapiens
LIQKL

SEQ ID NO: 4326 - protein, 5 aa, Homo sapiens
GLINM

SEQ ID NO: 4327 - protein, 5 aa, Homo sapiens
KESEL

SEQ ID NO: 4328 - protein, 5 aa, Homo sapiens
FKHKP

SEQ ID NO: 4329 - protein, 5 aa, Homo sapiens
VISQN

SEQ ID NO: 4330 - protein, 5 aa, Homo sapiens
PHLVK

SEQ ID NO: 4331 - protein, 5 aa, Homo sapiens
PIELD

SEQ ID NO: 4332 - protein, 5 aa, Homo sapiens
WRGMY

SEQ ID NO: 4333 - protein, 5 aa, Homo sapiens
FFHLN

SEQ ID NO: 4334 - protein, 5 aa, Homo sapiens
NGASV

SEQ ID NO: 4335 - protein, 5 aa, Homo sapiens
EKTVS

SEQ ID NO: 4336 - protein, 5 aa, Homo sapiens
KYMVH

SEQ ID NO: 4337 - protein, 5 aa, Homo sapiens
MGVSS

SEQ ID NO: 4338 - protein, 5 aa, Homo sapiens
TAKLC

SEQ ID NO: 4339 - protein, 5 aa, Homo sapiens
LVQQS

SEQ ID NO: 4340 - protein, 5 aa, Homo sapiens
KSGQQ

SEQ ID NO: 4341 - protein, 5 aa, Homo sapiens
LMKKT

SEQ ID NO: 4342 - protein, 5 aa, Homo sapiens
RNGGL

SEQ ID NO: 4343 - protein, 5 aa, Homo sapiens
VEKKE

SEQ ID NO: 4344 - protein, 5 aa, Homo sapiens
RGMSI

SEQ ID NO: 4345 - protein, 5 aa, Homo sapiens
AATYL

SEQ ID NO: 4346 - protein, 5 aa, Homo sapiens
GPLNP

SEQ ID NO: 4347 - protein, 5 aa, Homo sapiens
QPHRP

SEQ ID NO: 4348 - protein, 5 aa, Homo sapiens
LGCTH

SEQ ID NO: 4349 - protein, 5 aa, Homo sapiens
MAAKL

SEQ ID NO: 4350 - protein, 5 aa, Homo sapiens
MHSLK

SEQ ID NO: 4351 - protein, 5 aa, Homo sapiens
PCFER

SEQ ID NO: 4352 - protein, 5 aa, Homo sapiens
NLETM

SEQ ID NO: 4353 - protein, 5 aa, Homo sapiens
PFRWS

SEQ ID NO: 4354 - protein, 5 aa, Homo sapiens
LSDSD

SEQ ID NO: 4355 - protein, 5 aa, Homo sapiens
QHAAK

SEQ ID NO: 4356 - protein, 5 aa, Homo sapiens
ISNIK

SEQ ID NO: 4357 - protein, 5 aa, Homo sapiens
YKELD

SEQ ID NO: 4358 - protein, 5 aa, Homo sapiens
APPTL

SEQ ID NO: 4359 - protein, 5 aa, Homo sapiens
RKSMW

SEQ ID NO: 4360 - protein, 5 aa, Homo sapiens
GRGEQ

SEQ ID NO: 4361 - protein, 5 aa, Homo sapiens
WSVEL

SEQ ID NO: 4362 - protein, 5 aa, Homo sapiens
CALCA

SEQ ID NO: 4363 - protein, 5 aa, Homo sapiens
AAEPH

SEQ ID NO: 4364 - protein, 5 aa, Homo sapiens
DHERK

SEQ ID NO: 4365 - protein, 5 aa, Homo sapiens
IEEPK

SEQ ID NO: 4366 - protein, 5 aa, Homo sapiens
TASQA

SEQ ID NO: 4367 - protein, 5 aa, Homo sapiens
QRFLD

SEQ ID NO: 4368 - protein, 5 aa, Homo sapiens
IKNTF

SEQ ID NO: 4369 - protein, 5 aa, Homo sapiens
STFVA

SEQ ID NO: 4370 - protein, 5 aa, Homo sapiens
PSSKC

SEQ ID NO: 4371 - protein, 5 aa, Homo sapiens
NATDP

SEQ ID NO: 4372 - protein, 5 aa, Homo sapiens
HGYYA

SEQ ID NO: 4373 - protein, 5 aa, Homo sapiens
HAYFA

SEQ ID NO: 4374 - protein, 5 aa, Homo sapiens
GFGKS

SEQ ID NO: 4375 - protein, 5 aa, Homo sapiens
METSP

SEQ ID NO: 4376 - protein, 5 aa, Homo sapiens
ATSIL

SEQ ID NO: 4377 - protein, 5 aa, Homo sapiens
DDHVL

SEQ ID NO: 4378 - protein, 5 aa, Homo sapiens
LSSLP

SEQ ID NO: 4379 - protein, 5 aa, Homo sapiens
GGKGN

SEQ ID NO: 4380 - protein, 5 aa, Homo sapiens
GAPTL

SEQ ID NO: 4381 - protein, 5 aa, Homo sapiens
LTTWK

SEQ ID NO: 4382 - protein, 5 aa, Homo sapiens
KPSSS

SEQ ID NO: 4383 - protein, 5 aa, Homo sapiens
GPEGK

SEQ ID NO: 4384 - protein, 5 aa, Homo sapiens
KYGPL

SEQ ID NO: 4385 - protein, 5 aa, Homo sapiens
QMKTL

SEQ ID NO: 4386 - protein, 5 aa, Homo sapiens
QFGII

SEQ ID NO: 4387 - protein, 5 aa, Homo sapiens
PKVEL

SEQ ID NO: 4388 - protein, 5 aa, Homo sapiens
QEDEC

SEQ ID NO: 4389 - protein, 5 aa, Homo sapiens
SSVSQ

SEQ ID NO: 4390 - protein, 5 aa, Homo sapiens
SVYGK

SEQ ID NO: 4391 - protein, 5 aa, Homo sapiens
KKSEC

SEQ ID NO: 4392 - protein, 5 aa, Homo sapiens
QRFMW

SEQ ID NO: 4393 - protein, 5 aa, Homo sapiens
GNSII

SEQ ID NO: 4394 - protein, 5 aa, Homo sapiens
IQWTL

SEQ ID NO: 4395 - protein, 5 aa, Homo sapiens
VWYVR

SEQ ID NO: 4396 - protein, 5 aa, Homo sapiens
KRLKR

SEQ ID NO: 4397 - protein, 5 aa, Homo sapiens
LKVPE

SEQ ID NO: 4398 - protein, 5 aa, Homo sapiens
CLAVV

SEQ ID NO: 4399 - protein, 5 aa, Homo sapiens
EELSD

SEQ ID NO: 4400 - protein, 5 aa, Homo sapiens
STPTN

SEQ ID NO: 4401 - protein, 5 aa, Homo sapiens
MNGKN

SEQ ID NO: 4402 - protein, 5 aa, Homo sapiens
KTVNI

SEQ ID NO: 4403 - protein, 5 aa, Homo sapiens
PPHRY

SEQ ID NO: 4404 - protein, 5 aa, Homo sapiens
DQALF

SEQ ID NO: 4405 - protein, 5 aa, Homo sapiens
VSQPS

SEQ ID NO: 4406 - protein, 5 aa, Homo sapiens
PACSP

SEQ ID NO: 4407 - protein, 5 aa, Homo sapiens
FRKVR

SEQ ID NO: 4408 - protein, 5 aa, Homo sapiens
NSKHH

SEQ ID NO: 4409 - protein, 5 aa, Homo sapiens
SSGVP

SEQ ID NO: 4410 - protein, 5 aa, Homo sapiens
FVAST

SEQ ID NO: 4411 - protein, 5 aa, Homo sapiens
NLNNY

SEQ ID NO: 4412 - protein, 5 aa, Homo sapiens
KGLAW

SEQ ID NO: 4413 - protein, 5 aa, Homo sapiens
RVTTV

SEQ ID NO: 4414 - protein, 5 aa, Homo sapiens
ACGCS

SEQ ID NO: 4415 - protein, 5 aa, Homo sapiens
LVLLD

SEQ ID NO: 4416 - protein, 5 aa, Homo sapiens
TSNSA

SEQ ID NO: 4417 - protein, 5 aa, Homo sapiens
FWPRG

SEQ ID NO: 4418 - protein, 5 aa, Homo sapiens
FVPCL

SEQ ID NO: 4419 - protein, 5 aa, Homo sapiens
EYRHR

SEQ ID NO: 4420 - protein, 5 aa, Homo sapiens
PESDL

SEQ ID NO: 4421 - protein, 5 aa, Homo sapiens
YGLVA

SEQ ID NO: 4422 - protein, 5 aa, Homo sapiens
ILNGE

SEQ ID NO: 4423 - protein, 5 aa, Homo sapiens
EVTLN

SEQ ID NO: 4424 - protein, 5 aa, Homo sapiens
QAVII

SEQ ID NO: 4425 - protein, 5 aa, Homo sapiens
RGNKH

SEQ ID NO: 4426 - protein, 5 aa, Homo sapiens
GEMRE

SEQ ID NO: 4427 - protein, 5 aa, Homo sapiens
LIYKT

SEQ ID NO: 4428 - protein, 5 aa, Homo sapiens
LRAHF

SEQ ID NO: 4429 - protein, 5 aa, Homo sapiens
QSMLF

SEQ ID NO: 4430 - protein, 5 aa, Homo sapiens
FTNWF

SEQ ID NO: 4431 - protein, 5 aa, Homo sapiens
LQQVA

SEQ ID NO: 4432 - protein, 5 aa, Homo sapiens
KKPRK

SEQ ID NO: 4433 - protein, 5 aa, Homo sapiens
KPPWK

SEQ ID NO: 4434 - protein, 5 aa, Homo sapiens
ESEGL

SEQ ID NO: 4435 - protein, 5 aa, Homo sapiens
TRFKN

SEQ ID NO: 4436 - protein, 5 aa, Homo sapiens
SMSTN

SEQ ID NO: 4437 - protein, 5 aa, Homo sapiens
PHLRL

SEQ ID NO: 4438 - protein, 5 aa, Homo sapiens
VYVSP

SEQ ID NO: 4439 - protein, 5 aa, Homo sapiens
VTTEG

SEQ ID NO: 4440 - protein, 5 aa, Homo sapiens
MAGSK

SEQ ID NO: 4441 - protein, 5 aa, Homo sapiens
PAKAL

SEQ ID NO: 4442 - protein, 5 aa, Homo sapiens
EELLG

SEQ ID NO: 4443 - protein, 5 aa, Homo sapiens
PKVIQ

SEQ ID NO: 4444 - protein, 5 aa, Homo sapiens
ENPQL

SEQ ID NO: 4445 - protein, 5 aa, Homo sapiens
FHRLH

SEQ ID NO: 4446 - protein, 5 aa, Homo sapiens
RFGKK

SEQ ID NO: 4447 - protein, 5 aa, Homo sapiens
RSSKR

SEQ ID NO: 4448 - protein, 5 aa, Homo sapiens
VPPPQ

SEQ ID NO: 4449 - protein, 5 aa, Homo sapiens
ASLPP

SEQ ID NO: 4450 - protein, 5 aa, Homo sapiens
DSPTL

SEQ ID NO: 4451 - protein, 5 aa, Homo sapiens
NAQRT

SEQ ID NO: 4452 - protein, 5 aa, Homo sapiens
KTQHQ

SEQ ID NO: 4453 - protein, 5 aa, Homo sapiens
LPQIS

SEQ ID NO: 4454 - protein, 5 aa, Homo sapiens
KKEKK

SEQ ID NO: 4455 - protein, 5 aa, Homo sapiens
GCYSE

SEQ ID NO: 4456 - protein, 5 aa, Homo sapiens
KKTSR

SEQ ID NO: 4457 - protein, 5 aa, Homo sapiens
GQFSL

SEQ ID NO: 4458 - protein, 5 aa, Homo sapiens
VPEAG

SEQ ID NO: 4459 - protein, 5 aa, Homo sapiens
NKEEK

SEQ ID NO: 4460 - protein, 5 aa, Homo sapiens
YLRED

SEQ ID NO: 4461 - protein, 5 aa, Homo sapiens
NLSNA

SEQ ID NO: 4462 - protein, 5 aa, Homo sapiens
RGTLN

SEQ ID NO: 4463 - protein, 5 aa, Homo sapiens
MEKPF

SEQ ID NO: 4464 - protein, 5 aa, Homo sapiens
GFILQ

SEQ ID NO: 4465 - protein, 5 aa, Homo sapiens
LCLLL

SEQ ID NO: 4466 - protein, 5 aa, Homo sapiens
SSTRR

SEQ ID NO: 4467 - protein, 5 aa, Homo sapiens
ILKWD

SEQ ID NO: 4468 - protein, 5 aa, Homo sapiens
EGKKR

SEQ ID NO: 4469 - protein, 5 aa, Homo sapiens
VRTIH

SEQ ID NO: 4470 - protein, 5 aa, Homo sapiens
SGCCA

SEQ ID NO: 4471 - protein, 5 aa, Homo sapiens
LHHGS

SEQ ID NO: 4472 - protein, 5 aa, Homo sapiens
RITTL

SEQ ID NO: 4473 - protein, 5 aa, Homo sapiens
EPPAP

SEQ ID NO: 4474 - protein, 5 aa, Homo sapiens
DLSVL

SEQ ID NO: 4475 - protein, 5 aa, Homo sapiens
LIFPL

SEQ ID NO: 4476 - protein, 5 aa, Homo sapiens
SQLLT

SEQ ID NO: 4477 - protein, 5 aa, Homo sapiens
SSRPL

SEQ ID NO: 4478 - protein, 5 aa, Homo sapiens
PQKVG

SEQ ID NO: 4479 - protein, 5 aa, Homo sapiens
SILED

SEQ ID NO: 4480 - protein, 5 aa, Homo sapiens
SRKHN

SEQ ID NO: 4481 - protein, 5 aa, Homo sapiens
LKSDI

SEQ ID NO: 4482 - protein, 5 aa, Homo sapiens
ATDKS

SEQ ID NO: 4483 - protein, 5 aa, Homo sapiens
QRFEL

SEQ ID NO: 4484 - protein, 5 aa, Homo sapiens
QGPID

SEQ ID NO: 4485 - protein, 5 aa, Homo sapiens
LSKSN

SEQ ID NO: 4486 - protein, 5 aa, Homo sapiens
KRHAE

SEQ ID NO: 4487 - protein, 5 aa, Homo sapiens
SEDEF

SEQ ID NO: 4488 - protein, 5 aa, Homo sapiens
AHSSG

SEQ ID NO: 4489 - protein, 5 aa, Homo sapiens
GIRWE

SEQ ID NO: 4490 - protein, 5 aa, Homo sapiens
SHSRV

SEQ ID NO: 4491 - protein, 5 aa, Homo sapiens
RRKKQ

SEQ ID NO: 4492 - protein, 5 aa, Homo sapiens
TMFAW

SEQ ID NO: 4493 - protein, 5 aa, Homo sapiens
LEVLE

SEQ ID NO: 4494 - protein, 5 aa, Homo sapiens
AIFTQ

SEQ ID NO: 4495 - protein, 5 aa, Homo sapiens
EEISL

SEQ ID NO: 4496 - protein, 5 aa, Homo sapiens
QLEKK

SEQ ID NO: 4497 - protein, 5 aa, Homo sapiens
NPEAQ

SEQ ID NO: 4498 - protein, 5 aa, Homo sapiens
VFGYL

SEQ ID NO: 4499 - protein, 5 aa, Homo sapiens
SQYPF

SEQ ID NO: 4500 - protein, 5 aa, Homo sapiens
DLLKQ

SEQ ID NO: 4501 - protein, 5 aa, Homo sapiens
GGLLL

SEQ ID NO: 4502 - protein, 5 aa, Homo sapiens
HTPLI

SEQ ID NO: 4503 - protein, 5 aa, Homo sapiens
KRKTT

SEQ ID NO: 4504 - protein, 5 aa, Homo sapiens
SDQNP

SEQ ID NO: 4505 - protein, 5 aa, Homo sapiens
HYENF

SEQ ID NO: 4506 - protein, 5 aa, Homo sapiens
SLYHS

SEQ ID NO: 4507 - protein, 5 aa, Homo sapiens
KTLKL

SEQ ID NO: 4508 - protein, 5 aa, Homo sapiens
PMAIT

SEQ ID NO: 4509 - protein, 5 aa, Homo sapiens
LQAMV

SEQ ID NO: 4510 - protein, 5 aa, Homo sapiens
YGTEL

SEQ ID NO: 4511 - protein, 5 aa, Homo sapiens
PKNEQ

SEQ ID NO: 4512 - protein, 5 aa, Homo sapiens
SNTTE

SEQ ID NO: 4513 - protein, 5 aa, Homo sapiens
ATAAQ

SEQ ID NO: 4514 - protein, 5 aa, Homo sapiens
SGYSS

SEQ ID NO: 4515 - protein, 5 aa, Homo sapiens
GEDDD

SEQ ID NO: 4516 - protein, 5 aa, Homo sapiens
MSSLG

SEQ ID NO: 4517 - protein, 5 aa, Homo sapiens
PKEDG

SEQ ID NO: 4518 - protein, 5 aa, Homo sapiens
ILKKK

SEQ ID NO: 4519 - protein, 5 aa, Homo sapiens
LKQYC

SEQ ID NO: 4520 - protein, 5 aa, Homo sapiens
GGTYA

SEQ ID NO: 4521 - protein, 5 aa, Homo sapiens
YDCPI

SEQ ID NO: 4522 - protein, 5 aa, Homo sapiens
TRYYC

SEQ ID NO: 4523 - protein, 5 aa, Homo sapiens
QPPPH

SEQ ID NO: 4524 - protein, 5 aa, Homo sapiens
SNSVN

SEQ ID NO: 4525 - protein, 5 aa, Homo sapiens
QSSTC

SEQ ID NO: 4526 - protein, 5 aa, Homo sapiens
VSFIL

SEQ ID NO: 4527 - protein, 5 aa, Homo sapiens
EATQQ

SEQ ID NO: 4528 - protein, 5 aa, Homo sapiens
QIREK

SEQ ID NO: 4529 - protein, 5 aa, Homo sapiens
ASQQS

SEQ ID NO: 4530 - protein, 5 aa, Homo sapiens
PPPNS

SEQ ID NO: 4531 - protein, 5 aa, Homo sapiens
PCFSP

SEQ ID NO: 4532 - protein, 5 aa, Homo sapiens
VMQDT

SEQ ID NO: 4533 - protein, 5 aa, Homo sapiens
EFEQT

SEQ ID NO: 4534 - protein, 5 aa, Homo sapiens
AFQGN

SEQ ID NO: 4535 - protein, 5 aa, Homo sapiens
VPLVP

SEQ ID NO: 4536 - protein, 5 aa, Homo sapiens
SQPGP

SEQ ID NO: 4537 - protein, 5 aa, Homo sapiens
EADLE

SEQ ID NO: 4538 - protein, 5 aa, Homo sapiens
ENFKK

SEQ ID NO: 4539 - protein, 5 aa, Homo sapiens
PSTAH

SEQ ID NO: 4540 - protein, 5 aa, Homo sapiens
WLEDL

SEQ ID NO: 4541 - protein, 5 aa, Homo sapiens
RHCCT

SEQ ID NO: 4542 - protein, 5 aa, Homo sapiens
ELLGC

SEQ ID NO: 4543 - protein, 5 aa, Homo sapiens
YYNVL

SEQ ID NO: 4544 - protein, 5 aa, Homo sapiens
NQDGE

SEQ ID NO: 4545 - protein, 5 aa, Homo sapiens
CDGAT

SEQ ID NO: 4546 - protein, 5 aa, Homo sapiens
DQSAL

SEQ ID NO: 4547 - protein, 5 aa, Homo sapiens
KFYGK

SEQ ID NO: 4548 - protein, 5 aa, Homo sapiens
RADRL

SEQ ID NO: 4549 - protein, 5 aa, Homo sapiens
LSKNK

SEQ ID NO: 4550 - protein, 5 aa, Homo sapiens
LVHRE

SEQ ID NO: 4551 - protein, 5 aa, Homo sapiens
LADFK

SEQ ID NO: 4552 - protein, 5 aa, Homo sapiens
ELLFS

SEQ ID NO: 4553 - protein, 5 aa, Homo sapiens
ESPEK

SEQ ID NO: 4554 - protein, 5 aa, Homo sapiens
LLIQS

SEQ ID NO: 4555 - protein, 5 aa, Homo sapiens
NVPLS

SEQ ID NO: 4556 - protein, 5 aa, Homo sapiens
ARVPA

SEQ ID NO: 4557 - protein, 5 aa, Homo sapiens
SRSSS

SEQ ID NO: 4558 - protein, 5 aa, Homo sapiens
LEAKP

SEQ ID NO: 4559 - protein, 5 aa, Homo sapiens
FVDEL

SEQ ID NO: 4560 - protein, 5 aa, Homo sapiens
LSSHS

SEQ ID NO: 4561 - protein, 5 aa, Homo sapiens
NYERP

SEQ ID NO: 4562 - protein, 5 aa, Homo sapiens
HFYQT

SEQ ID NO: 4563 - protein, 5 aa, Homo sapiens
ARFGL

SEQ ID NO: 4564 - protein, 5 aa, Homo sapiens
LYQDI

SEQ ID NO: 4565 - protein, 5 aa, Homo sapiens
DTFRL

SEQ ID NO: 4566 - protein, 5 aa, Homo sapiens
MASLD

SEQ ID NO: 4567 - protein, 5 aa, Homo sapiens
ATSRL

SEQ ID NO: 4568 - protein, 5 aa, Homo sapiens
AKGKK

SEQ ID NO: 4569 - protein, 5 aa, Homo sapiens
FDDDS

SEQ ID NO: 4570 - protein, 5 aa, Homo sapiens
ESEDS

SEQ ID NO: 4571 - protein, 5 aa, Homo sapiens
MKLSV

SEQ ID NO: 4572 - protein, 5 aa, Homo sapiens
SLACL

SEQ ID NO: 4573 - protein, 5 aa, Homo sapiens
LDSTD

SEQ ID NO: 4574 - protein, 5 aa, Homo sapiens
GKFRN

SEQ ID NO: 4575 - protein, 5 aa, Homo sapiens
QQITV

SEQ ID NO: 4576 - protein, 5 aa, Homo sapiens
LHHGD

SEQ ID NO: 4577 - protein, 5 aa, Homo sapiens
TSGDL

SEQ ID NO: 4578 - protein, 5 aa, Homo sapiens
AAATS

SEQ ID NO: 4579 - protein, 5 aa, Homo sapiens
SGSNH

SEQ ID NO: 4580 - protein, 5 aa, Homo sapiens
PDVEA

SEQ ID NO: 4581 - protein, 5 aa, Homo sapiens
DTVPR

SEQ ID NO: 4582 - protein, 5 aa, Homo sapiens
CLWSH

SEQ ID NO: 4583 - protein, 5 aa, Homo sapiens
VGTPT

SEQ ID NO: 4584 - protein, 5 aa, Homo sapiens
PTWPK

SEQ ID NO: 4585 - protein, 5 aa, Homo sapiens
EIPKE

SEQ ID NO: 4586 - protein, 5 aa, Homo sapiens
PSSYS

SEQ ID NO: 4587 - protein, 5 aa, Homo sapiens
IYEFR

SEQ ID NO: 4588 - protein, 5 aa, Homo sapiens
PGCTP

SEQ ID NO: 4589 - protein, 5 aa, Homo sapiens
EPVPP

SEQ ID NO: 4590 - protein, 5 aa, Homo sapiens
TQWLC

SEQ ID NO: 4591 - protein, 5 aa, Homo sapiens
GGEDD

SEQ ID NO: 4592 - protein, 5 aa, Homo sapiens
LILWL

SEQ ID NO: 4593 - protein, 5 aa, Homo sapiens
QRNNL

SEQ ID NO: 4594 - protein, 5 aa, Homo sapiens
FVKKR

SEQ ID NO: 4595 - protein, 5 aa, Homo sapiens
IGLDD

SEQ ID NO: 4596 - protein, 5 aa, Homo sapiens
LEDKS

SEQ ID NO: 4597 - protein, 5 aa, Homo sapiens
RCAIM

SEQ ID NO: 4598 - protein, 5 aa, Homo sapiens
IKPVS

SEQ ID NO: 4599 - protein, 5 aa, Homo sapiens
YLKKT

SEQ ID NO: 4600 - protein, 5 aa, Homo sapiens
KSKVE

SEQ ID NO: 4601 - protein, 5 aa, Homo sapiens
TNPFL

SEQ ID NO: 4602 - protein, 5 aa, Homo sapiens
PVMAN

SEQ ID NO: 4603 - protein, 5 aa, Homo sapiens
VMNET

SEQ ID NO: 4604 - protein, 5 aa, Homo sapiens
LIENK

SEQ ID NO: 4605 - protein, 5 aa, Homo sapiens
KRSKK

SEQ ID NO: 4606 - protein, 5 aa, Homo sapiens
FYNTM

SEQ ID NO: 4607 - protein, 5 aa, Homo sapiens
LPPPP

SEQ ID NO: 4608 - protein, 5 aa, Homo sapiens
DGCDF

SEQ ID NO: 4609 - protein, 5 aa, Homo sapiens
KSPSL

SEQ ID NO: 4610 - protein, 5 aa, Homo sapiens
PQEEP

SEQ ID NO: 4611 - protein, 5 aa, Homo sapiens
PQEDP

SEQ ID NO: 4612 - protein, 5 aa, Homo sapiens
PIHSS

SEQ ID NO: 4613 - protein, 5 aa, Homo sapiens
FGYSM

SEQ ID NO: 4614 - protein, 5 aa, Homo sapiens
GNYQQ

SEQ ID NO: 4615 - protein, 5 aa, Homo sapiens
GGGDD

SEQ ID NO: 4616 - protein, 5 aa, Homo sapiens
LALLK

SEQ ID NO: 4617 - protein, 5 aa, Homo sapiens
EKVAN

SEQ ID NO: 4618 - protein, 5 aa, Homo sapiens
RDDEK

SEQ ID NO: 4619 - protein, 5 aa, Homo sapiens
FRINF

SEQ ID NO: 4620 - protein, 5 aa, Homo sapiens
VSLQG

SEQ ID NO: 4621 - protein, 5 aa, Homo sapiens
LPEIF

SEQ ID NO: 4622 - protein, 5 aa, Homo sapiens
KEQLK

SEQ ID NO: 4623 - protein, 5 aa, Homo sapiens
RIAYL

SEQ ID NO: 4624 - protein, 5 aa, Homo sapiens
PLISR

SEQ ID NO: 4625 - protein, 5 aa, Homo sapiens
NQHAF

SEQ ID NO: 4626 - protein, 5 aa, Homo sapiens
GQNST

SEQ ID NO: 4627 - protein, 5 aa, Homo sapiens
ALALA

SEQ ID NO: 4628 - protein, 5 aa, Homo sapiens
SIPLA

SEQ ID NO: 4629 - protein, 5 aa, Homo sapiens
RPTTF

SEQ ID NO: 4630 - protein, 5 aa, Homo sapiens
RLLNF

SEQ ID NO: 4631 - protein, 5 aa, Homo sapiens
LPLSS

SEQ ID NO: 4632 - protein, 5 aa, Homo sapiens
ARRRK

SEQ ID NO: 4633 - protein, 5 aa, Homo sapiens
PGCPR

SEQ ID NO: 4634 - protein, 5 aa, Homo sapiens
EPPLL

SEQ ID NO: 4635 - protein, 5 aa, Homo sapiens
SGALP

SEQ ID NO: 4636 - protein, 5 aa, Homo sapiens
GPDSD

SEQ ID NO: 4637 - protein, 5 aa, Homo sapiens
KDWKD

SEQ ID NO: 4638 - protein, 5 aa, Homo sapiens
NQFPA

SEQ ID NO: 4639 - protein, 5 aa, Homo sapiens
SCKIS

SEQ ID NO: 4640 - protein, 5 aa, Homo sapiens
VADLI

SEQ ID NO: 4641 - protein, 5 aa, Homo sapiens
RNLVK

SEQ ID NO: 4642 - protein, 5 aa, Homo sapiens
EEVLS

SEQ ID NO: 4643 - protein, 5 aa, Homo sapiens
IFHSE

SEQ ID NO: 4644 - protein, 5 aa, Homo sapiens
FKEKR

SEQ ID NO: 4645 - protein, 5 aa, Homo sapiens
YAADP

SEQ ID NO: 4646 - protein, 5 aa, Homo sapiens
GPLAV

SEQ ID NO: 4647 - protein, 5 aa, Homo sapiens
TPSTK

SEQ ID NO: 4648 - protein, 5 aa, Homo sapiens
RARVS

SEQ ID NO: 4649 - protein, 5 aa, Homo sapiens
EYVTV

SEQ ID NO: 4650 - protein, 5 aa, Homo sapiens
LGADS

SEQ ID NO: 4651 - protein, 5 aa, Homo sapiens
TMDSD

SEQ ID NO: 4652 - protein, 5 aa, Homo sapiens
IPIKK

SEQ ID NO: 4653 - protein, 5 aa, Homo sapiens
GARKQ

SEQ ID NO: 4654 - protein, 5 aa, Homo sapiens
GGAKA

SEQ ID NO: 4655 - protein, 5 aa, Homo sapiens
LDSAD

SEQ ID NO: 4656 - protein, 5 aa, Homo sapiens
FGTEY

SEQ ID NO: 4657 - protein, 5 aa, Homo sapiens
LVFPL

SEQ ID NO: 4658 - protein, 5 aa, Homo sapiens
RLHCN

SEQ ID NO: 4659 - protein, 5 aa, Homo sapiens
EMQGP

SEQ ID NO: 4660 - protein, 5 aa, Homo sapiens
SNILT

SEQ ID NO: 4661 - protein, 5 aa, Homo sapiens
LDVPV

SEQ ID NO: 4662 - protein, 5 aa, Homo sapiens
KGPRY

SEQ ID NO: 4663 - protein, 5 aa, Homo sapiens
EDDLF

SEQ ID NO: 4664 - protein, 5 aa, Homo sapiens
QKVGL

SEQ ID NO: 4665 - protein, 5 aa, Homo sapiens
LVAAL

SEQ ID NO: 4666 - protein, 5 aa, Homo sapiens
DSFRE

SEQ ID NO: 4667 - protein, 5 aa, Homo sapiens
TKYRY

SEQ ID NO: 4668 - protein, 5 aa, Homo sapiens
AVPTE

SEQ ID NO: 4669 - protein, 5 aa, Homo sapiens
LPPRA

SEQ ID NO: 4670 - protein, 5 aa, Homo sapiens
EERKP

SEQ ID NO: 4671 - protein, 5 aa, Homo sapiens
DGFLG

SEQ ID NO: 4672 - protein, 5 aa, Homo sapiens
VFLKW

SEQ ID NO: 4673 - protein, 5 aa, Homo sapiens
TGEKP

SEQ ID NO: 4674 - protein, 5 aa, Homo sapiens
RIHSR

SEQ ID NO: 4675 - protein, 5 aa, Homo sapiens
QMYSY

SEQ ID NO: 4676 - protein, 5 aa, Homo sapiens
FIELH

SEQ ID NO: 4677 - protein, 5 aa, Homo sapiens
FHIRI

SEQ ID NO: 4678 - protein, 5 aa, Homo sapiens
RRNEL

SEQ ID NO: 4679 - protein, 5 aa, Homo sapiens
VPLPQ

SEQ ID NO: 4680 - protein, 5 aa, Homo sapiens
YCHKH

SEQ ID NO: 4681 - protein, 5 aa, Homo sapiens
ISLLS

SEQ ID NO: 4682 - protein, 5 aa, Homo sapiens
ELDGD

SEQ ID NO: 4683 - protein, 5 aa, Homo sapiens
HRKTR

SEQ ID NO: 4684 - protein, 5 aa, Homo sapiens
FLNDT

SEQ ID NO: 4685 - protein, 5 aa, Homo sapiens
IHNGI

SEQ ID NO: 4686 - protein, 5 aa, Homo sapiens
FLNDT

SEQ ID NO: 4687 - protein, 5 aa, Homo sapiens
LLNPI

SEQ ID NO: 4688 - protein, 5 aa, Homo sapiens
MTMSV

SEQ ID NO: 4689 - protein, 5 aa, Homo sapiens
TESQS

SEQ ID NO: 4690 - protein, 5 aa, Homo sapiens
VKTQC

SEQ ID NO: 4691 - protein, 5 aa, Homo sapiens
SPVPT

SEQ ID NO: 4692 - protein, 5 aa, Homo sapiens
QQDFV

SEQ ID NO: 4693 - protein, 5 aa, Homo sapiens
IGIAQ

SEQ ID NO: 4694 - protein, 5 aa, Homo sapiens
FVLVQ

SEQ ID NO: 4695 - protein, 5 aa, Homo sapiens
LTSSL

SEQ ID NO: 4696 - protein, 5 aa, Homo sapiens
ARKLD

SEQ ID NO: 4697 - protein, 5 aa, Homo sapiens
EHPEC

SEQ ID NO: 4698 - protein, 5 aa, Homo sapiens
ASGTA

SEQ ID NO: 4699 - protein, 5 aa, Homo sapiens
LRKRE

SEQ ID NO: 4700 - protein, 5 aa, Homo sapiens
SGTVV

SEQ ID NO: 4701 - protein, 5 aa, Homo sapiens
CLGPK

SEQ ID NO: 4702 - protein, 5 aa, Homo sapiens
FGDEC

SEQ ID NO: 4703 - protein, 5 aa, Homo sapiens
PRPEH

SEQ ID NO: 4704 - protein, 5 aa, Homo sapiens
GPVEN

SEQ ID NO: 4705 - protein, 5 aa, Homo sapiens
YTFKP

SEQ ID NO: 4706 - protein, 5 aa, Homo sapiens
DPAPA

SEQ ID NO: 4707 - protein, 5 aa, Homo sapiens
HWESW

SEQ ID NO: 4708 - protein, 5 aa, Homo sapiens
HVTEL

SEQ ID NO: 4709 - protein, 5 aa, Homo sapiens
KARGH

SEQ ID NO: 4710 - protein, 5 aa, Homo sapiens
TCHGH

SEQ ID NO: 4711 - protein, 5 aa, Homo sapiens
HWLKV

SEQ ID NO: 4712 - protein, 5 aa, Homo sapiens
VNVSA

SEQ ID NO: 4713 - protein, 5 aa, Homo sapiens
KVFSR

SEQ ID NO: 4714 - protein, 5 aa, Homo sapiens
RWKHP

SEQ ID NO: 4715 - protein, 5 aa, Homo sapiens
EKPYK

SEQ ID NO: 4716 - protein, 5 aa, Homo sapiens
KTTPV

SEQ ID NO: 4717 - protein, 5 aa, Homo sapiens
GGEGR

SEQ ID NO: 4718 - protein, 5 aa, Homo sapiens
NPFLL

SEQ ID NO: 4719 - protein, 5 aa, Homo sapiens
GGDPT

SEQ ID NO: 4720 - protein, 5 aa, Homo sapiens
AEAPR

SEQ ID NO: 4721 - protein, 5 aa, Homo sapiens
QLQLL

SEQ ID NO: 4722 - protein, 5 aa, Homo sapiens
QQGQS

SEQ ID NO: 4723 - protein, 5 aa, Homo sapiens
QGLDN

SEQ ID NO: 4724 - protein, 5 aa, Homo sapiens
TEQIL

SEQ ID NO: 4725 - protein, 5 aa, Homo sapiens
QDTPH

SEQ ID NO: 4726 - protein, 5 aa, Homo sapiens
SGAED

SEQ ID NO: 4727 - protein, 5 aa, Homo sapiens
TLPPA

SEQ ID NO: 4728 - protein, 5 aa, Homo sapiens
NAPRE

SEQ ID NO: 4729 - protein, 5 aa, Homo sapiens
LGGPV

SEQ ID NO: 4730 - protein, 5 aa, Homo sapiens
QQYCL

SEQ ID NO: 4731 - protein, 5 aa, Homo sapiens
QFQKF

SEQ ID NO: 4732 - protein, 5 aa, Homo sapiens
VLDAP

SEQ ID NO: 4733 - protein, 5 aa, Homo sapiens
AVRRA

SEQ ID NO: 4734 - protein, 5 aa, Homo sapiens
HGLLV

SEQ ID NO: 4735 - protein, 5 aa, Homo sapiens
AVPTF

SEQ ID NO: 4736 - protein, 5 aa, Homo sapiens
LWWRM

SEQ ID NO: 4737 - protein, 5 aa, Homo sapiens
HHDEL

SEQ ID NO: 4738 - protein, 5 aa, Homo sapiens
KETSF

SEQ ID NO: 4739 - protein, 5 aa, Homo sapiens
KLEEE

SEQ ID NO: 4740 - protein, 5 aa, Homo sapiens
LGGHT

SEQ ID NO: 4741 - protein, 5 aa, Homo sapiens
SREFS

SEQ ID NO: 4742 - protein, 5 aa, Homo sapiens
PINHL

SEQ ID NO: 4743 - protein, 5 aa, Homo sapiens
GEAPV

SEQ ID NO: 4744 - protein, 5 aa, Homo sapiens
SSYNA

SEQ ID NO: 4745 - protein, 5 aa, Homo sapiens
VQWES

SEQ ID NO: 4746 - protein, 5 aa, Homo sapiens
PQDQA

SEQ ID NO: 4747 - protein, 5 aa, Homo sapiens
RMHYY

SEQ ID NO: 4748 - protein, 5 aa, Homo sapiens
TPNFH

SEQ ID NO: 4749 - protein, 5 aa, Homo sapiens
RMMLR

SEQ ID NO: 4750 - protein, 5 aa, Homo sapiens
TVSRQ

SEQ ID NO: 4751 - protein, 5 aa, Homo sapiens
DMGHH

SEQ ID NO: 4752 - protein, 5 aa, Homo sapiens
KGPFG

SEQ ID NO: 4753 - protein, 5 aa, Homo sapiens
ERICH

SEQ ID NO: 4754 - protein, 5 aa, Homo sapiens
QAIVR

SEQ ID NO: 4755 - protein, 5 aa, Homo sapiens
KLHLC

SEQ ID NO: 4756 - protein, 5 aa, Homo sapiens
LPTSS

SEQ ID NO: 4757 - protein, 5 aa, Homo sapiens
VIKDI

SEQ ID NO: 4758 - protein, 5 aa, Homo sapiens
QTIGL

SEQ ID NO: 4759 - protein, 5 aa, Homo sapiens
KNINF

SEQ ID NO: 4760 - protein, 5 aa, Homo sapiens
FNFLH

SEQ ID NO: 4761 - protein, 5 aa, Homo sapiens
DDLSV

SEQ ID NO: 4762 - protein, 5 aa, Homo sapiens
AAEQR

SEQ ID NO: 4763 - protein, 5 aa, Homo sapiens
AKAHK

SEQ ID NO: 4764 - protein, 5 aa, Homo sapiens
AVCLA

SEQ ID NO: 4765 - protein, 5 aa, Homo sapiens
KRRED

SEQ ID NO: 4766 - protein, 5 aa, Homo sapiens
MSLVV

SEQ ID NO: 4767 - protein, 5 aa, Homo sapiens
VNSNN

SEQ ID NO: 4768 - protein, 5 aa, Homo sapiens
FKMST

SEQ ID NO: 4769 - protein, 5 aa, Homo sapiens
VKNGI

SEQ ID NO: 4770 - protein, 5 aa, Homo sapiens
AKYGF

SEQ ID NO: 4771 - protein, 5 aa, Homo sapiens
KDEES

SEQ ID NO: 4772 - protein, 5 aa, Homo sapiens
TWTLK

SEQ ID NO: 4773 - protein, 5 aa, Homo sapiens
RGICL

SEQ ID NO: 4774 - protein, 5 aa, Homo sapiens
SAYPY

SEQ ID NO: 4775 - protein, 5 aa, Homo sapiens
LNQGS

SEQ ID NO: 4776 - protein, 5 aa, Homo sapiens
SLSKK

SEQ ID NO: 4777 - protein, 5 aa, Homo sapiens
GPLPQ

SEQ ID NO: 4778 - protein, 5 aa, Homo sapiens
QTSSC

SEQ ID NO: 4779 - protein, 5 aa, Homo sapiens
SQKRT

SEQ ID NO: 4780 - protein, 5 aa, Homo sapiens
PQDPS

SEQ ID NO: 4781 - protein, 5 aa, Homo sapiens
SFPKM

SEQ ID NO: 4782 - protein, 5 aa, Homo sapiens
TNGIM

SEQ ID NO: 4783 - protein, 5 aa, Homo sapiens
SSTIK

SEQ ID NO: 4784 - protein, 5 aa, Homo sapiens
DLMEI

SEQ ID NO: 4785 - protein, 5 aa, Homo sapiens
IFGAS

SEQ ID NO: 4786 - protein, 5 aa, Homo sapiens
PGKKK

SEQ ID NO: 4787 - protein, 5 aa, Homo sapiens
YQIRI

SEQ ID NO: 4788 - protein, 5 aa, Homo sapiens
QLSRH

SEQ ID NO: 4789 - protein, 5 aa, Homo sapiens
RSTKP

SEQ ID NO: 4790 - protein, 5 aa, Homo sapiens
QIESI

SEQ ID NO: 4791 - protein, 5 aa, Homo sapiens
GNLRI

SEQ ID NO: 4792 - protein, 5 aa, Homo sapiens
HADEM

SEQ ID NO: 4793 - protein, 5 aa, Homo sapiens
SSSSC

SEQ ID NO: 4794 - protein, 5 aa, Homo sapiens
LTMNI

SEQ ID NO: 4795 - protein, 5 aa, Homo sapiens
LEKAH

SEQ ID NO: 4796 - protein, 5 aa, Homo sapiens
KGKKK

SEQ ID NO: 4797 - protein, 5 aa, Homo sapiens
LRNQK

SEQ ID NO: 4798 - protein, 5 aa, Homo sapiens
DAPLA

SEQ ID NO: 4799 - protein, 5 aa, Homo sapiens
TLVSS

SEQ ID NO: 4800 - protein, 5 aa, Homo sapiens
RRLQP

SEQ ID NO: 4801 - protein, 5 aa, Homo sapiens
RGSEA

SEQ ID NO: 4802 - protein, 5 aa, Homo sapiens
FPYIY

SEQ ID NO: 4803 - protein, 5 aa, Homo sapiens
YTCKG

SEQ ID NO: 4804 - protein, 5 aa, Homo sapiens
VLERQ

SEQ ID NO: 4805 - protein, 5 aa, Homo sapiens
FALAR

SEQ ID NO: 4806 - protein, 5 aa, Homo sapiens
FSGSM

SEQ ID NO: 4807 - protein, 5 aa, Homo sapiens
KSRRS

SEQ ID NO: 4808 - protein, 5 aa, Homo sapiens
SKIKC

SEQ ID NO: 4809 - protein, 5 aa, Homo sapiens
ACGCR

SEQ ID NO: 4810 - protein, 5 aa, Homo sapiens
CCKVL

SEQ ID NO: 4811 - protein, 5 aa, Homo sapiens
LSLLD

SEQ ID NO: 4812 - protein, 5 aa, Homo sapiens
TSSHL

SEQ ID NO: 4813 - protein, 5 aa, Homo sapiens
KFSVA

SEQ ID NO: 4814 - protein, 5 aa, Homo sapiens
PSQDW

SEQ ID NO: 4815 - protein, 5 aa, Homo sapiens
MMTAK

SEQ ID NO: 4816 - protein, 5 aa, Homo sapiens
KPEDK

SEQ ID NO: 4817 - protein, 5 aa, Homo sapiens
HFGLV

SEQ ID NO: 4818 - protein, 5 aa, Homo sapiens
WEQKR

SEQ ID NO: 4819 - protein, 5 aa, Homo sapiens
CKFKD

SEQ ID NO: 4820 - protein, 5 aa, Homo sapiens
PTSFL

SEQ ID NO: 4821 - protein, 5 aa, Homo sapiens
ALERV

SEQ ID NO: 4822 - protein, 5 aa, Homo sapiens
WILSN

SEQ ID NO: 4823 - protein, 5 aa, Homo sapiens
QWHYM

SEQ ID NO: 4824 - protein, 5 aa, Homo sapiens
KILGA

SEQ ID NO: 4825 - protein, 5 aa, Homo sapiens
HTIVD

SEQ ID NO: 4826 - protein, 5 aa, Homo sapiens
YTGHR

SEQ ID NO: 4827 - protein, 5 aa, Homo sapiens
YTGHR

SEQ ID NO: 4828 - protein, 5 aa, Homo sapiens
RPEGL

SEQ ID NO: 4829 - protein, 5 aa, Homo sapiens
KRAAT

SEQ ID NO: 4830 - protein, 5 aa, Homo sapiens
KVGSL

SEQ ID NO: 4831 - protein, 5 aa, Homo sapiens
LQSPV

SEQ ID NO: 4832 - protein, 5 aa, Homo sapiens
YNKGL

SEQ ID NO: 4833 - protein, 5 aa, Homo sapiens
RQKIY

SEQ ID NO: 4834 - protein, 5 aa, Homo sapiens
PCVLQ

SEQ ID NO: 4835 - protein, 5 aa, Homo sapiens
WEWTQ

SEQ ID NO: 4836 - protein, 5 aa, Homo sapiens
FHFQF

SEQ ID NO: 4837 - protein, 5 aa, Homo sapiens
SIYYH

SEQ ID NO: 4838 - protein, 5 aa, Homo sapiens
LLYPD

SEQ ID NO: 4839 - protein, 5 aa, Homo sapiens
NPGRS

SEQ ID NO: 4840 - protein, 5 aa, Homo sapiens
VILRM

SEQ ID NO: 4841 - protein, 5 aa, Homo sapiens
NVANG

SEQ ID NO: 4842 - protein, 5 aa, Homo sapiens
VTNGS

SEQ ID NO: 4843 - protein, 5 aa, Homo sapiens
KKSCK

SEQ ID NO: 4844 - protein, 5 aa, Homo sapiens
YTGHR

SEQ ID NO: 4845 - protein, 5 aa, Homo sapiens
SPHLA

SEQ ID NO: 4846 - protein, 5 aa, Homo sapiens
INKVV

SEQ ID NO: 4847 - protein, 5 aa, Homo sapiens
STQQM

SEQ ID NO: 4848 - protein, 5 aa, Homo sapiens
YLSSG

SEQ ID NO: 4849 - protein, 5 aa, Homo sapiens
GDLDM

SEQ ID NO: 4850 - protein, 5 aa, Homo sapiens
AKSEL

SEQ ID NO: 4851 - protein, 5 aa, Homo sapiens
RSFQY

SEQ ID NO: 4852 - protein, 5 aa, Homo sapiens
YNHYS

SEQ ID NO: 4853 - protein, 5 aa, Homo sapiens
VKVSS

SEQ ID NO: 4854 - protein, 5 aa, Homo sapiens
SLTAE

SEQ ID NO: 4855 - protein, 5 aa, Homo sapiens
STRLI

SEQ ID NO: 4856 - protein, 5 aa, Homo sapiens
CVYNV

SEQ ID NO: 4857 - protein, 5 aa, Homo sapiens
QKEDL

SEQ ID NO: 4858 - protein, 5 aa, Homo sapiens
MPTLR

SEQ ID NO: 4859 - protein, 5 aa, Homo sapiens
TEDVL

SEQ ID NO: 4860 - protein, 5 aa, Homo sapiens
CMSLL

SEQ ID NO: 4861 - protein, 5 aa, Homo sapiens
EKKAM

SEQ ID NO: 4862 - protein, 5 aa, Homo sapiens
DQMES

SEQ ID NO: 4863 - protein, 5 aa, Homo sapiens
LPTMD

SEQ ID NO: 4864 - protein, 5 aa, Homo sapiens
LANRD

SEQ ID NO: 4865 - protein, 5 aa, Homo sapiens
EQSTK

SEQ ID NO: 4866 - protein, 5 aa, Homo sapiens
KRYAR

SEQ ID NO: 4867 - protein, 5 aa, Homo sapiens
VWRPW

SEQ ID NO: 4868 - protein, 5 aa, Homo sapiens
REEFQ

SEQ ID NO: 4869 - protein, 5 aa, Homo sapiens
LRKTS

SEQ ID NO: 4870 - protein, 5 aa, Homo sapiens
PSVVS

SEQ ID NO: 4871 - protein, 5 aa, Homo sapiens
QCCSN

SEQ ID NO: 4872 - protein, 5 aa, Homo sapiens
AVAEP

SEQ ID NO: 4873 - protein, 5 aa, Homo sapiens
PRPGS

SEQ ID NO: 4874 - protein, 5 aa, Homo sapiens
LHMPV

SEQ ID NO: 4875 - protein, 5 aa, Homo sapiens
PLPPQ

SEQ ID NO: 4876 - protein, 5 aa, Homo sapiens
RVTTV

SEQ ID NO: 4877 - protein, 5 aa, Homo sapiens
NLLVD

SEQ ID NO: 4878 - protein, 5 aa, Homo sapiens
MHKSK

SEQ ID NO: 4879 - protein, 5 aa, Homo sapiens
SPRML

SEQ ID NO: 4880 - protein, 5 aa, Homo sapiens
SDSDD

SEQ ID NO: 4881 - protein, 5 aa, Homo sapiens
EGEAS

SEQ ID NO: 4882 - protein, 5 aa, Homo sapiens
LWKAH

SEQ ID NO: 4883 - protein, 5 aa, Homo sapiens
GNKSA

SEQ ID NO: 4884 - protein, 5 aa, Homo sapiens
RDEDP

SEQ ID NO: 4885 - protein, 5 aa, Homo sapiens
EPVPV

SEQ ID NO: 4886 - protein, 5 aa, Homo sapiens
MGLKS

SEQ ID NO: 4887 - protein, 5 aa, Homo sapiens
SSDDV

SEQ ID NO: 4888 - protein, 5 aa, Homo sapiens
RLCNR

SEQ ID NO: 4889 - protein, 5 aa, Homo sapiens
VLENI

SEQ ID NO: 4890 - protein, 5 aa, Homo sapiens
SVLCS

SEQ ID NO: 4891 - protein, 5 aa, Homo sapiens
SKVKE

SEQ ID NO: 4892 - protein, 5 aa, Homo sapiens
LAPKS

SEQ ID NO: 4893 - protein, 5 aa, Homo sapiens
VPDIF

SEQ ID NO: 4894 - protein, 5 aa, Homo sapiens
DSSPA

SEQ ID NO: 4895 - protein, 5 aa, Homo sapiens
VPNLF

SEQ ID NO: 4896 - protein, 5 aa, Homo sapiens
SHDEL

SEQ ID NO: 4897 - protein, 5 aa, Homo sapiens
HQHHF

SEQ ID NO: 4898 - protein, 5 aa, Homo sapiens
AWSVS

SEQ ID NO: 4899 - protein, 5 aa, Homo sapiens
CPLET

SEQ ID NO: 4900 - protein, 5 aa, Homo sapiens
AKESI

SEQ ID NO: 4901 - protein, 5 aa, Homo sapiens
KVQEE

SEQ ID NO: 4902 - protein, 5 aa, Homo sapiens
STIVN

SEQ ID NO: 4903 - protein, 5 aa, Homo sapiens
KIACV

SEQ ID NO: 4904 - protein, 5 aa, Homo sapiens
SLHYD

SEQ ID NO: 4905 - protein, 5 aa, Homo sapiens
NENNS

SEQ ID NO: 4906 - protein, 5 aa, Homo sapiens
PPLTI

SEQ ID NO: 4907 - protein, 5 aa, Homo sapiens
RSLED

SEQ ID NO: 4908 - protein, 5 aa, Homo sapiens
LAKIA

SEQ ID NO: 4909 - protein, 5 aa, Homo sapiens
TKLGL

SEQ ID NO: 4910 - protein, 5 aa, Homo sapiens
CFEVE

SEQ ID NO: 4911 - protein, 5 aa, Homo sapiens
HPSHF

SEQ ID NO: 4912 - protein, 5 aa, Homo sapiens
LELGI

SEQ ID NO: 4913 - protein, 5 aa, Homo sapiens
VTFEY

SEQ ID NO: 4914 - protein, 5 aa, Homo sapiens
QRIGK

SEQ ID NO: 4915 - protein, 5 aa, Homo sapiens
FYPRN

SEQ ID NO: 4916 - protein, 5 aa, Homo sapiens
LDQNL

SEQ ID NO: 4917 - protein, 5 aa, Homo sapiens
SDNES

SEQ ID NO: 4918 - protein, 5 aa, Homo sapiens
YYTLK

SEQ ID NO: 4919 - protein, 5 aa, Homo sapiens
KTHRE

SEQ ID NO: 4920 - protein, 5 aa, Homo sapiens
LLSYT

SEQ ID NO: 4921 - protein, 5 aa, Homo sapiens
CALDY

SEQ ID NO: 4922 - protein, 5 aa, Homo sapiens
RVGHC

SEQ ID NO: 4923 - protein, 5 aa, Homo sapiens
LSLNE

SEQ ID NO: 4924 - protein, 5 aa, Homo sapiens
ARTDL

SEQ ID NO: 4925 - protein, 5 aa, Homo sapiens
TWKPL

SEQ ID NO: 4926 - protein, 5 aa, Homo sapiens
VMSMS

SEQ ID NO: 4927 - protein, 5 aa, Homo sapiens
KWYQF

SEQ ID NO: 4928 - protein, 5 aa, Homo sapiens
SDSDD

SEQ ID NO: 4929 - protein, 5 aa, Homo sapiens
SLCEK

SEQ ID NO: 4930 - protein, 5 aa, Homo sapiens
TRCVS

SEQ ID NO: 4931 - protein, 5 aa, Homo sapiens
SSEDD

SEQ ID NO: 4932 - protein, 5 aa, Homo sapiens
RHFKV

SEQ ID NO: 4933 - protein, 5 aa, Homo sapiens
SPANV

SEQ ID NO: 4934 - protein, 5 aa, Homo sapiens
ESDPR

SEQ ID NO: 4935 - protein, 5 aa, Homo sapiens
TQIKR

SEQ ID NO: 4936 - protein, 5 aa, Homo sapiens
GMVPL

SEQ ID NO: 4937 - protein, 5 aa, Homo sapiens
TFLLN

SEQ ID NO: 4938 - protein, 5 aa, Homo sapiens
KGKES

SEQ ID NO: 4939 - protein, 5 aa, Homo sapiens
AQTSL

SEQ ID NO: 4940 - protein, 5 aa, Homo sapiens
ITSCE

SEQ ID NO: 4941 - protein, 5 aa, Homo sapiens
LPSST

SEQ ID NO: 4942 - protein, 5 aa, Homo sapiens
DEFMI

SEQ ID NO: 4943 - protein, 5 aa, Homo sapiens
LKNIL

SEQ ID NO: 4944 - protein, 5 aa, Homo sapiens
NSLPH

SEQ ID NO: 4945 - protein, 5 aa, Homo sapiens
VVDCM

SEQ ID NO: 4946 - protein, 5 aa, Homo sapiens
EVEQR

SEQ ID NO: 4947 - protein, 5 aa, Homo sapiens
PSPQI

SEQ ID NO: 4948 - protein, 5 aa, Homo sapiens
KKKEV

SEQ ID NO: 4949 - protein, 5 aa, Homo sapiens
DQQTR

SEQ ID NO: 4950 - protein, 5 aa, Homo sapiens
GLHTL

SEQ ID NO: 4951 - protein, 5 aa, Homo sapiens
IFKKD

SEQ ID NO: 4952 - protein, 5 aa, Homo sapiens
ETLNL

SEQ ID NO: 4953 - protein, 5 aa, Homo sapiens
GFPPR

SEQ ID NO: 4954 - protein, 5 aa, Homo sapiens
NNSLS

SEQ ID NO: 4955 - protein, 5 aa, Homo sapiens
ATQQK

SEQ ID NO: 4956 - protein, 5 aa, Homo sapiens
FGPYY

SEQ ID NO: 4957 - protein, 5 aa, Homo sapiens
EVVSV

SEQ ID NO: 4958 - protein, 5 aa, Homo sapiens
RKLQC

SEQ ID NO: 4959 - protein, 5 aa, Homo sapiens
SLGLE

SEQ ID NO: 4960 - protein, 5 aa, Homo sapiens
GSTGG

SEQ ID NO: 4961 - protein, 5 aa, Homo sapiens
HQQQD

SEQ ID NO: 4962 - protein, 5 aa, Homo sapiens
EDVGH

SEQ ID NO: 4963 - protein, 5 aa, Homo sapiens
RQHHH

SEQ ID NO: 4964 - protein, 5 aa, Homo sapiens
QSSQE

SEQ ID NO: 4965 - protein, 5 aa, Homo sapiens
SERTT

SEQ ID NO: 4966 - protein, 5 aa, Homo sapiens
SKSNL

SEQ ID NO: 4967 - protein, 5 aa, Homo sapiens
IPFLF

SEQ ID NO: 4968 - protein, 5 aa, Homo sapiens
QGSSR

SEQ ID NO: 4969 - protein, 5 aa, Homo sapiens
HIPVF

SEQ ID NO: 4970 - protein, 5 aa, Homo sapiens
WALDL

SEQ ID NO: 4971 - protein, 5 aa, Homo sapiens
GEHYC

SEQ ID NO: 4972 - protein, 5 aa, Homo sapiens
KVKKT

SEQ ID NO: 4973 - protein, 5 aa, Homo sapiens
LQRCN

SEQ ID NO: 4974 - protein, 5 aa, Homo sapiens
IKGAV

SEQ ID NO: 4975 - protein, 5 aa, Homo sapiens
SSEED

SEQ ID NO: 4976 - protein, 5 aa, Homo sapiens
FRAYN

SEQ ID NO: 4977 - protein, 5 aa, Homo sapiens
LICLL

SEQ ID NO: 4978 - protein, 5 aa, Homo sapiens
KFKSQ

SEQ ID NO: 4979 - protein, 5 aa, Homo sapiens
NTNVP

SEQ ID NO: 4980 - protein, 5 aa, Homo sapiens
CLSGL

SEQ ID NO: 4981 - protein, 5 aa, Homo sapiens
TNDVR

SEQ ID NO: 4982 - protein, 5 aa, Homo sapiens
LCGYH

SEQ ID NO: 4983 - protein, 5 aa, Homo sapiens
APSGV

SEQ ID NO: 4984 - protein, 5 aa, Homo sapiens
MNEQI

SEQ ID NO: 4985 - protein, 5 aa, Homo sapiens
DEENI

SEQ ID NO: 4986 - protein, 5 aa, Homo sapiens
VSLHR

SEQ ID NO: 4987 - protein, 5 aa, Homo sapiens
LDSLT

SEQ ID NO: 4988 - protein, 5 aa, Homo sapiens
SQAWG

SEQ ID NO: 4989 - protein, 5 aa, Homo sapiens
SSSSE

SEQ ID NO: 4990 - protein, 5 aa, Homo sapiens
LQQKS

SEQ ID NO: 4991 - protein, 5 aa, Homo sapiens
YVEFL

SEQ ID NO: 4992 - protein, 5 aa, Homo sapiens
PTAYL

SEQ ID NO: 4993 - protein, 5 aa, Homo sapiens
FPMQL

SEQ ID NO: 4994 - protein, 5 aa, Homo sapiens
KKHQS

SEQ ID NO: 4995 - protein, 5 aa, Homo sapiens
MRGKI

SEQ ID NO: 4996 - protein, 5 aa, Homo sapiens
GLFTL

SEQ ID NO: 4997 - protein, 5 aa, Homo sapiens
PVESA

SEQ ID NO: 4998 - protein, 5 aa, Homo sapiens
SSSVE

SEQ ID NO: 4999 - protein, 5 aa, Homo sapiens
LYYVN

SEQ ID NO: 5000 - protein, 5 aa, Homo sapiens
HDGSC

SEQ ID NO: 5001 - protein, 5 aa, Homo sapiens
VKTEL

SEQ ID NO: 5002 - protein, 5 aa, Homo sapiens
DVHNQ

SEQ ID NO: 5003 - protein, 5 aa, Homo sapiens
TVVKS

SEQ ID NO: 5004 - protein, 5 aa, Homo sapiens
ESSKI

SEQ ID NO: 5005 - protein, 5 aa, Homo sapiens
LPLPL

SEQ ID NO: 5006 - protein, 5 aa, Homo sapiens
LCMCA

SEQ ID NO: 5007 - protein, 5 aa, Homo sapiens
PTHPA

SEQ ID NO: 5008 - protein, 5 aa, Homo sapiens
LAAQK

SEQ ID NO: 5009 - protein, 5 aa, Homo sapiens
DFVTK

SEQ ID NO: 5010 - protein, 5 aa, Homo sapiens
SKMTS

SEQ ID NO: 5011 - protein, 5 aa, Homo sapiens
PIEQK

SEQ ID NO: 5012 - protein, 5 aa, Homo sapiens
VEGRF

SEQ ID NO: 5013 - protein, 5 aa, Homo sapiens
VKVYN

SEQ ID NO: 5014 - protein, 5 aa, Homo sapiens
KAPPF

SEQ ID NO: 5015 - protein, 5 aa, Homo sapiens
TGPDT

SEQ ID NO: 5016 - protein, 5 aa, Homo sapiens
KECEV

SEQ ID NO: 5017 - protein, 5 aa, Homo sapiens
TKKSY

SEQ ID NO: 5018 - protein, 5 aa, Homo sapiens
LLSLW

SEQ ID NO: 5019 - protein, 5 aa, Homo sapiens
YTSSK

SEQ ID NO: 5020 - protein, 5 aa, Homo sapiens
QVKEK

SEQ ID NO: 5021 - protein, 5 aa, Homo sapiens
LRIWP

SEQ ID NO: 5022 - protein, 5 aa, Homo sapiens
MKSRP

SEQ ID NO: 5023 - protein, 5 aa, Homo sapiens
IEKYN

SEQ ID NO: 5024 - protein, 5 aa, Homo sapiens
PREAE

SEQ ID NO: 5025 - protein, 5 aa, Homo sapiens
KQQSV

SEQ ID NO: 5026 - protein, 5 aa, Homo sapiens
LVRDS

SEQ ID NO: 5027 - protein, 5 aa, Homo sapiens
ESCRR

SEQ ID NO: 5028 - protein, 5 aa, Homo sapiens
NRLNY

SEQ ID NO: 5029 - protein, 5 aa, Homo sapiens
DSKEQ

SEQ ID NO: 5030 - protein, 5 aa, Homo sapiens
SQLQQ

SEQ ID NO: 5031 - protein, 5 aa, Homo sapiens
NFPCG

SEQ ID NO: 5032 - protein, 5 aa, Homo sapiens
LLCTD

SEQ ID NO: 5033 - protein, 5 aa, Homo sapiens
YKQRI

SEQ ID NO: 5034 - protein, 5 aa, Homo sapiens
NLIGW

SEQ ID NO: 5035 - protein, 5 aa, Homo sapiens
ENDNT

SEQ ID NO: 5036 - protein, 5 aa, Homo sapiens
VNAVE

SEQ ID NO: 5037 - protein, 5 aa, Homo sapiens
RLQST

SEQ ID NO: 5038 - protein, 5 aa, Homo sapiens
LLSLD

SEQ ID NO: 5039 - protein, 5 aa, Homo sapiens
SPSEV

SEQ ID NO: 5040 - protein, 5 aa, Homo sapiens
KSKPL

SEQ ID NO: 5041 - protein, 5 aa, Homo sapiens
FSEHI

SEQ ID NO: 5042 - protein, 5 aa, Homo sapiens
SLFLE

SEQ ID NO: 5043 - protein, 5 aa, Homo sapiens
GCKGS

SEQ ID NO: 5044 - protein, 5 aa, Homo sapiens
LELSS

SEQ ID NO: 5045 - protein, 5 aa, Homo sapiens
LPNET

SEQ ID NO: 5046 - protein, 5 aa, Homo sapiens
LNSRI

SEQ ID NO: 5047 - protein, 5 aa, Homo sapiens
LSPET

SEQ ID NO: 5048 - protein, 5 aa, Homo sapiens
LGPSS

SEQ ID NO: 5049 - protein, 5 aa, Homo sapiens
ESDSD

SEQ ID NO: 5050 - protein, 5 aa, Homo sapiens
QIRRH

SEQ ID NO: 5051 - protein, 5 aa, Homo sapiens
DIMLQ

SEQ ID NO: 5052 - protein, 5 aa, Homo sapiens
ETQTL

SEQ ID NO: 5053 - protein, 5 aa, Homo sapiens
KKESG

SEQ ID NO: 5054 - protein, 5 aa, Homo sapiens
EFIGA

SEQ ID NO: 5055 - protein, 5 aa, Homo sapiens
EKWIQ

SEQ ID NO: 5056 - protein, 5 aa, Homo sapiens
DLLVE

SEQ ID NO: 5057 - protein, 5 aa, Homo sapiens
EVDED

SEQ ID NO: 5058 - protein, 5 aa, Homo sapiens
SEENE

SEQ ID NO: 5059 - protein, 5 aa, Homo sapiens
FNVQN

SEQ ID NO: 5060 - protein, 5 aa, Homo sapiens
LRLLP

SEQ ID NO: 5061 - protein, 5 aa, Homo sapiens
LCQPS

SEQ ID NO: 5062 - protein, 5 aa, Homo sapiens
YLRAS

SEQ ID NO: 5063 - protein, 5 aa, Homo sapiens
SSLKG

SEQ ID NO: 5064 - protein, 5 aa, Homo sapiens
GELEE

SEQ ID NO: 5065 - protein, 5 aa, Homo sapiens
AATEA

SEQ ID NO: 5066 - protein, 5 aa, Homo sapiens
ELKLT

SEQ ID NO: 5067 - protein, 5 aa, Homo sapiens
TCTDL

SEQ ID NO: 5068 - protein, 5 aa, Homo sapiens
SVDDY

SEQ ID NO: 5069 - protein, 5 aa, Homo sapiens
WIFGE

SEQ ID NO: 5070 - protein, 5 aa, Homo sapiens
TFLLR

SEQ ID NO: 5071 - protein, 5 aa, Homo sapiens
DDEDL

SEQ ID NO: 5072 - protein, 5 aa, Homo sapiens
VSCEK

SEQ ID NO: 5073 - protein, 5 aa, Homo sapiens
KLESC

SEQ ID NO: 5074 - protein, 5 aa, Homo sapiens
QGFKD

SEQ ID NO: 5075 - protein, 5 aa, Homo sapiens
ASLRM

SEQ ID NO: 5076 - protein, 5 aa, Homo sapiens
THCTC

SEQ ID NO: 5077 - protein, 5 aa, Homo sapiens
FLHKK

SEQ ID NO: 5078 - protein, 5 aa, Homo sapiens
YEDYY

SEQ ID NO: 5079 - protein, 5 aa, Homo sapiens
LVKKS

SEQ ID NO: 5080 - protein, 5 aa, Homo sapiens
GFGLA

SEQ ID NO: 5081 - protein, 5 aa, Homo sapiens
QGLVL

SEQ ID NO: 5082 - protein, 5 aa, Homo sapiens
PEEPI

SEQ ID NO: 5083 - protein, 5 aa, Homo sapiens
RENSW

SEQ ID NO: 5084 - protein, 5 aa, Homo sapiens
VDTEF

SEQ ID NO: 5085 - protein, 5 aa, Homo sapiens
ADGAT

SEQ ID NO: 5086 - protein, 5 aa, Homo sapiens
LPEDE

SEQ ID NO: 5087 - protein, 5 aa, Homo sapiens
LDSDE

SEQ ID NO: 5088 - protein, 5 aa, Homo sapiens
TPELC

SEQ ID NO: 5089 - protein, 5 aa, Homo sapiens
KRRRY

SEQ ID NO: 5090 - protein, 5 aa, Homo sapiens
KSKKN

SEQ ID NO: 5091 - protein, 5 aa, Homo sapiens
ELEII

SEQ ID NO: 5092 - protein, 5 aa, Homo sapiens
LKPET

SEQ ID NO: 5093 - protein, 5 aa, Homo sapiens
SSSGN

SEQ ID NO: 5094 - protein, 5 aa, Homo sapiens
DEEEK

SEQ ID NO: 5095 - protein, 5 aa, Homo sapiens
KTLIK

SEQ ID NO: 5096 - protein, 5 aa, Homo sapiens
RISSV

SEQ ID NO: 5097 - protein, 5 aa, Homo sapiens
EGGEE

SEQ ID NO: 5098 - protein, 5 aa, Homo sapiens
RYAEV

SEQ ID NO: 5099 - protein, 5 aa, Homo sapiens
SYFFP

SEQ ID NO: 5100 - protein, 5 aa, Homo sapiens
SEFDG

SEQ ID NO: 5101 - protein, 5 aa, Homo sapiens
RSQSI

SEQ ID NO: 5102 - protein, 5 aa, Homo sapiens
KHRNQ

SEQ ID NO: 5103 - protein, 5 aa, Homo sapiens
DTKSR

SEQ ID NO: 5104 - protein, 5 aa, Homo sapiens
DLFKF

SEQ ID NO: 5105 - protein, 5 aa, Homo sapiens
EEEGV

SEQ ID NO: 5106 - protein, 5 aa, Homo sapiens
DTEIP

SEQ ID NO: 5107 - protein, 5 aa, Homo sapiens
VYHMY

SEQ ID NO: 5108 - protein, 5 aa, Homo sapiens
PDHEE

SEQ ID NO: 5109 - protein, 5 aa, Homo sapiens
DSAKH

SEQ ID NO: 5110 - protein, 5 aa, Homo sapiens
NTGKS

SEQ ID NO: 5111 - protein, 5 aa, Homo sapiens
GQKKI

SEQ ID NO: 5112 - protein, 5 aa, Homo sapiens
IVADD

SEQ ID NO: 5113 - protein, 5 aa, Homo sapiens
KKGPK

SEQ ID NO: 5114 - protein, 5 aa, Homo sapiens
DSAMS

SEQ ID NO: 5115 - protein, 5 aa, Homo sapiens
EPGSQ

SEQ ID NO: 5116 - protein, 5 aa, Homo sapiens
SEARC

SEQ ID NO: 5117 - protein, 5 aa, Homo sapiens
ATKEN

SEQ ID NO: 5118 - protein, 5 aa, Homo sapiens
KGIHV

SEQ ID NO: 5119 - protein, 5 aa, Homo sapiens
YQQQP

SEQ ID NO: 5120 - protein, 5 aa, Homo sapiens
MSSGR

SEQ ID NO: 5121 - protein, 5 aa, Homo sapiens
AVQLI

SEQ ID NO: 5122 - protein, 5 aa, Homo sapiens
RSFYW

SEQ ID NO: 5123 - protein, 5 aa, Homo sapiens
YCTDS

SEQ ID NO: 5124 - protein, 5 aa, Homo sapiens
EIIGK

SEQ ID NO: 5125 - protein, 5 aa, Homo sapiens
EHHEK

SEQ ID NO: 5126 - protein, 5 aa, Homo sapiens
WKAHL

SEQ ID NO: 5127 - protein, 5 aa, Homo sapiens
FHEDY

SEQ ID NO: 5128 - protein, 5 aa, Homo sapiens
SDSED

SEQ ID NO: 5129 - protein, 5 aa, Homo sapiens
LSALL

SEQ ID NO: 5130 - protein, 5 aa, Homo sapiens
FRIKT

SEQ ID NO: 5131 - protein, 5 aa, Homo sapiens
KQAHP

SEQ ID NO: 5132 - protein, 5 aa, Homo sapiens
ALLLC

SEQ ID NO: 5133 - protein, 5 aa, Homo sapiens
GVKLS

SEQ ID NO: 5134 - protein, 5 aa, Homo sapiens
DRANQ

SEQ ID NO: 5135 - protein, 5 aa, Homo sapiens
RRWRP

SEQ ID NO: 5136 - protein, 5 aa, Homo sapiens
QEYNN

SEQ ID NO: 5137 - protein, 5 aa, Homo sapiens
RERPM

SEQ ID NO: 5138 - protein, 5 aa, Homo sapiens
FFPGI

SEQ ID NO: 5139 - protein, 5 aa, Homo sapiens
IQILA

SEQ ID NO: 5140 - protein, 5 aa, Homo sapiens
QLAEA

SEQ ID NO: 5141 - protein, 5 aa, Homo sapiens
LNYFK

SEQ ID NO: 5142 - protein, 5 aa, Homo sapiens
PRSQD

SEQ ID NO: 5143 - protein, 5 aa, Homo sapiens
PRSQD

SEQ ID NO: 5144 - protein, 5 aa, Homo sapiens
IHTRE

SEQ ID NO: 5145 - protein, 5 aa, Homo sapiens
AGQSP

SEQ ID NO: 5146 - protein, 5 aa, Homo sapiens
YSKGR

SEQ ID NO: 5147 - protein, 5 aa, Homo sapiens
EHKTH

SEQ ID NO: 5148 - protein, 5 aa, Homo sapiens
TATGD

SEQ ID NO: 5149 - protein, 5 aa, Homo sapiens
LRRKE

SEQ ID NO: 5150 - protein, 5 aa, Homo sapiens
LFRRK

SEQ ID NO: 5151 - protein, 5 aa, Homo sapiens
FCTIL

SEQ ID NO: 5152 - protein, 5 aa, Homo sapiens
LWEGI

SEQ ID NO: 5153 - protein, 5 aa, Homo sapiens
FGQDP

SEQ ID NO: 5154 - protein, 5 aa, Homo sapiens
KTGSH

SEQ ID NO: 5155 - protein, 5 aa, Homo sapiens
LDILG

SEQ ID NO: 5156 - protein, 5 aa, Homo sapiens
LNKEE

SEQ ID NO: 5157 - protein, 5 aa, Homo sapiens
KAINQ

SEQ ID NO: 5158 - protein, 5 aa, Homo sapiens
EAKKE

SEQ ID NO: 5159 - protein, 5 aa, Homo sapiens
RLDPE

SEQ ID NO: 5160 - protein, 5 aa, Homo sapiens
KQEAK

SEQ ID NO: 5161 - protein, 5 aa, Homo sapiens
SASDS

SEQ ID NO: 5162 - protein, 5 aa, Homo sapiens
VEDDI

SEQ ID NO: 5163 - protein, 5 aa, Homo sapiens
ITSPE

SEQ ID NO: 5164 - protein, 5 aa, Homo sapiens
EPCRF

SEQ ID NO: 5165 - protein, 5 aa, Homo sapiens
KIHRV

SEQ ID NO: 5166 - protein, 5 aa, Homo sapiens
PPMRE

SEQ ID NO: 5167 - protein, 5 aa, Homo sapiens
SDQDG

SEQ ID NO: 5168 - protein, 5 aa, Homo sapiens
EWEGN

SEQ ID NO: 5169 - protein, 5 aa, Homo sapiens
QDHWC

SEQ ID NO: 5170 - protein, 5 aa, Homo sapiens
YAGTL

SEQ ID NO: 5171 - protein, 5 aa, Homo sapiens
LRESS

SEQ ID NO: 5172 - protein, 5 aa, Homo sapiens
ESVLL

SEQ ID NO: 5173 - protein, 5 aa, Homo sapiens
KPRKH

SEQ ID NO: 5174 - protein, 5 aa, Homo sapiens
SPSLN

SEQ ID NO: 5175 - protein, 5 aa, Homo sapiens
HFDTI

SEQ ID NO: 5176 - protein, 5 aa, Homo sapiens
VAKTI

SEQ ID NO: 5177 - protein, 5 aa, Homo sapiens
GFMNN

SEQ ID NO: 5178 - protein, 5 aa, Homo sapiens
GVTFT

SEQ ID NO: 5179 - protein, 5 aa, Homo sapiens
AKCEG

SEQ ID NO: 5180 - protein, 5 aa, Homo sapiens
KAKLF

SEQ ID NO: 5181 - protein, 5 aa, Homo sapiens
SESGF

SEQ ID NO: 5182 - protein, 5 aa, Homo sapiens
PAWDI

SEQ ID NO: 5183 - protein, 5 aa, Homo sapiens
VATGC

SEQ ID NO: 5184 - protein, 5 aa, Homo sapiens
PRPRL

SEQ ID NO: 5185 - protein, 5 aa, Homo sapiens
KNLRR

SEQ ID NO: 5186 - protein, 5 aa, Homo sapiens
QNPML

SEQ ID NO: 5187 - protein, 5 aa, Homo sapiens
APHFL

SEQ ID NO: 5188 - protein, 5 aa, Homo sapiens
KKEIK

SEQ ID NO: 5189 - protein, 5 aa, Homo sapiens
RRQQT

SEQ ID NO: 5190 - protein, 5 aa, Homo sapiens
QETQI

SEQ ID NO: 5191 - protein, 5 aa, Homo sapiens
RFSDD

SEQ ID NO: 5192 - protein, 5 aa, Homo sapiens
LPEKY

SEQ ID NO: 5193 - protein, 5 aa, Homo sapiens
LPKKY

SEQ ID NO: 5194 - protein, 5 aa, Homo sapiens
EEKRF

SEQ ID NO: 5195 - protein, 5 aa, Homo sapiens
IRHLK

SEQ ID NO: 5196 - protein, 5 aa, Homo sapiens
SSLCN

SEQ ID NO: 5197 - protein, 5 aa, Homo sapiens
RRGNL

SEQ ID NO: 5198 - protein, 5 aa, Homo sapiens
TRDKS

SEQ ID NO: 5199 - protein, 5 aa, Homo sapiens
KTKKN

SEQ ID NO: 5200 - protein, 5 aa, Homo sapiens
ENGIV

SEQ ID NO: 5201 - protein, 5 aa, Homo sapiens
ERNMK

SEQ ID NO: 5202 - protein, 5 aa, Homo sapiens
WKREK

SEQ ID NO: 5203 - protein, 5 aa, Homo sapiens
MKIGV

SEQ ID NO: 5204 - protein, 5 aa, Homo sapiens
YDPRA

SEQ ID NO: 5205 - protein, 5 aa, Homo sapiens
TSSFL

SEQ ID NO: 5206 - protein, 5 aa, Homo sapiens
SGSDE

SEQ ID NO: 5207 - protein, 5 aa, Homo sapiens
SEVTA

SEQ ID NO: 5208 - protein, 5 aa, Homo sapiens
NGYIA

SEQ ID NO: 5209 - protein, 5 aa, Homo sapiens
LFWKT

SEQ ID NO: 5210 - protein, 5 aa, Homo sapiens
TRHLT

SEQ ID NO: 5211 - protein, 5 aa, Homo sapiens
NSGEL

SEQ ID NO: 5212 - protein, 5 aa, Homo sapiens
EKFEL

SEQ ID NO: 5213 - protein, 5 aa, Homo sapiens
PLRKH

SEQ ID NO: 5214 - protein, 5 aa, Homo sapiens
EMGRR

SEQ ID NO: 5215 - protein, 5 aa, Homo sapiens
TDCCS

SEQ ID NO: 5216 - protein, 5 aa, Homo sapiens
PVPTA

SEQ ID NO: 5217 - protein, 5 aa, Homo sapiens
SQLGY

SEQ ID NO: 5218 - protein, 5 aa, Homo sapiens
NGTLV

SEQ ID NO: 5219 - protein, 5 aa, Homo sapiens
LHYDE

SEQ ID NO: 5220 - protein, 5 aa, Homo sapiens
WKAWV

SEQ ID NO: 5221 - protein, 5 aa, Homo sapiens
NGTKS

SEQ ID NO: 5222 - protein, 5 aa, Homo sapiens
QFGIP

SEQ ID NO: 5223 - protein, 5 aa, Homo sapiens
LNDAH

SEQ ID NO: 5224 - protein, 5 aa, Homo sapiens
SSEPE

SEQ ID NO: 5225 - protein, 5 aa, Homo sapiens
ENTGV

SEQ ID NO: 5226 - protein, 5 aa, Homo sapiens
KNDEL

SEQ ID NO: 5227 - protein, 5 aa, Homo sapiens
EPAGY

SEQ ID NO: 5228 - protein, 5 aa, Homo sapiens
HQRTH

SEQ ID NO: 5229 - protein, 5 aa, Homo sapiens
KPHHF

SEQ ID NO: 5230 - protein, 5 aa, Homo sapiens
EEERK

SEQ ID NO: 5231 - protein, 5 aa, Homo sapiens
LRLRR

SEQ ID NO: 5232 - protein, 5 aa, Homo sapiens
IVLED

SEQ ID NO: 5233 - protein, 5 aa, Homo sapiens
MQVRR

SEQ ID NO: 5234 - protein, 5 aa, Homo sapiens
DLSEA

SEQ ID NO: 5235 - protein, 5 aa, Homo sapiens
YRLCD

SEQ ID NO: 5236 - protein, 5 aa, Homo sapiens
AYLHK

SEQ ID NO: 5237 - protein, 5 aa, Homo sapiens
SSLDV

SEQ ID NO: 5238 - protein, 5 aa, Homo sapiens
ESNRQ

SEQ ID NO: 5239 - protein, 5 aa, Homo sapiens
SPNLL

SEQ ID NO: 5240 - protein, 5 aa, Homo sapiens
GSTSP

SEQ ID NO: 5241 - protein, 5 aa, Homo sapiens
PPNSV

SEQ ID NO: 5242 - protein, 5 aa, Homo sapiens
DREPN

SEQ ID NO: 5243 - protein, 5 aa, Homo sapiens
AALSV

SEQ ID NO: 5244 - protein, 5 aa, Homo sapiens
PPIDL

SEQ ID NO: 5245 - protein, 5 aa, Homo sapiens
ATAGH

SEQ ID NO: 5246 - protein, 5 aa, Homo sapiens
REEPS

SEQ ID NO: 5247 - protein, 5 aa, Homo sapiens
WLPAT

SEQ ID NO: 5248 - protein, 5 aa, Homo sapiens
VLCPT

SEQ ID NO: 5249 - protein, 5 aa, Homo sapiens
AIFAF

SEQ ID NO: 5250 - protein, 5 aa, Homo sapiens
AGSLV

SEQ ID NO: 5251 - protein, 5 aa, Homo sapiens
MQTHV

SEQ ID NO: 5252 - protein, 5 aa, Homo sapiens
KVYRF

SEQ ID NO: 5253 - protein, 5 aa, Homo sapiens
LEDTD

SEQ ID NO: 5254 - protein, 5 aa, Homo sapiens
DDGAK

SEQ ID NO: 5255 - protein, 5 aa, Homo sapiens
YEETY

SEQ ID NO: 5256 - protein, 5 aa, Homo sapiens
AGPVT

SEQ ID NO: 5257 - protein, 5 aa, Homo sapiens
RQIIS

SEQ ID NO: 5258 - protein, 5 aa, Homo sapiens
SLYLT

SEQ ID NO: 5259 - protein, 5 aa, Homo sapiens
SSCTR

SEQ ID NO: 5260 - protein, 5 aa, Homo sapiens
MECFC

SEQ ID NO: 5261 - protein, 5 aa, Homo sapiens
DAPQM

SEQ ID NO: 5262 - protein, 5 aa, Homo sapiens
DLLKE

SEQ ID NO: 5263 - protein, 5 aa, Homo sapiens
KDKDD

SEQ ID NO: 5264 - protein, 5 aa, Homo sapiens
PLASL

SEQ ID NO: 5265 - protein, 5 aa, Homo sapiens
TFRTL

SEQ ID NO: 5266 - protein, 5 aa, Homo sapiens
HDRPG

SEQ ID NO: 5267 - protein, 5 aa, Homo sapiens
GVPPL

SEQ ID NO: 5268 - protein, 5 aa, Homo sapiens
LGKTT

SEQ ID NO: 5269 - protein, 5 aa, Homo sapiens
YKPPR

SEQ ID NO: 5270 - protein, 5 aa, Homo sapiens
ELSPC

SEQ ID NO: 5271 - protein, 5 aa, Homo sapiens
LTQQF

SEQ ID NO: 5272 - protein, 5 aa, Homo sapiens
GIFSH

SEQ ID NO: 5273 - protein, 5 aa, Homo sapiens
SGLSF

SEQ ID NO: 5274 - protein, 5 aa, Homo sapiens
RLSRY

SEQ ID NO: 5275 - protein, 5 aa, Homo sapiens
EVTQF

SEQ ID NO: 5276 - protein, 5 aa, Homo sapiens
LLPPL

SEQ ID NO: 5277 - protein, 5 aa, Homo sapiens
GHEAF

SEQ ID NO: 5278 - protein, 5 aa, Homo sapiens
ENTQL

SEQ ID NO: 5279 - protein, 5 aa, Homo sapiens
LEKGF

SEQ ID NO: 5280 - protein, 5 aa, Homo sapiens
LTMFA

SEQ ID NO: 5281 - protein, 5 aa, Homo sapiens
MQIPT

SEQ ID NO: 5282 - protein, 5 aa, Homo sapiens
PNANS

SEQ ID NO: 5283 - protein, 5 aa, Homo sapiens
MPYIY

SEQ ID NO: 5284 - protein, 5 aa, Homo sapiens
ICERG

SEQ ID NO: 5285 - protein, 5 aa, Homo sapiens
SKPMY

SEQ ID NO: 5286 - protein, 5 aa, Homo sapiens
ADYFL

SEQ ID NO: 5287 - protein, 5 aa, Homo sapiens
DGESN

SEQ ID NO: 5288 - protein, 5 aa, Homo sapiens
SRTRL

SEQ ID NO: 5289 - protein, 5 aa, Homo sapiens
EAAHH

SEQ ID NO: 5290 - protein, 5 aa, Homo sapiens
SWLHC

SEQ ID NO: 5291 - protein, 5 aa, Homo sapiens
PSTSW

SEQ ID NO: 5292 - protein, 5 aa, Homo sapiens
WKQKA

SEQ ID NO: 5293 - protein, 5 aa, Homo sapiens
SLQST

SEQ ID NO: 5294 - protein, 5 aa, Homo sapiens
WICQY

SEQ ID NO: 5295 - protein, 5 aa, Homo sapiens
GQPPQ

SEQ ID NO: 5296 - protein, 5 aa, Homo sapiens
IESDV

SEQ ID NO: 5297 - protein, 5 aa, Homo sapiens
SATTC

SEQ ID NO: 5298 - protein, 5 aa, Homo sapiens
FKIPI

SEQ ID NO: 5299 - protein, 5 aa, Homo sapiens
TYVRQ

SEQ ID NO: 5300 - protein, 5 aa, Homo sapiens
PGGSA

SEQ ID NO: 5301 - protein, 5 aa, Homo sapiens
EKYIK

SEQ ID NO: 5302 - protein, 5 aa, Homo sapiens
PSTKL

SEQ ID NO: 5303 - protein, 5 aa, Homo sapiens
KMTVE

SEQ ID NO: 5304 - protein, 5 aa, Homo sapiens
RRSSL

SEQ ID NO: 5305 - protein, 5 aa, Homo sapiens
PLHSY

SEQ ID NO: 5306 - protein, 5 aa, Homo sapiens
KRYRE

SEQ ID NO: 5307 - protein, 5 aa, Homo sapiens
YKQGN

SEQ ID NO: 5308 - protein, 5 aa, Homo sapiens
EEFYI

SEQ ID NO: 5309 - protein, 5 aa, Homo sapiens
ATKYV

SEQ ID NO: 5310 - protein, 5 aa, Homo sapiens
PQQET

SEQ ID NO: 5311 - protein, 5 aa, Homo sapiens
IVIEA

SEQ ID NO: 5312 - protein, 5 aa, Homo sapiens
RLKQS

SEQ ID NO: 5313 - protein, 5 aa, Homo sapiens
VLPLL

SEQ ID NO: 5314 - protein, 5 aa, Homo sapiens
KPESY

SEQ ID NO: 5315 - protein, 5 aa, Homo sapiens
RKRIV

SEQ ID NO: 5316 - protein, 5 aa, Homo sapiens
LNAYT

SEQ ID NO: 5317 - protein, 5 aa, Homo sapiens
RLNPF

SEQ ID NO: 5318 - protein, 5 aa, Homo sapiens
MDKKP

SEQ ID NO: 5319 - protein, 5 aa, Homo sapiens
PQMMS

SEQ ID NO: 5320 - protein, 5 aa, Homo sapiens
PKTRV

SEQ ID NO: 5321 - protein, 5 aa, Homo sapiens
ECKEP

SEQ ID NO: 5322 - protein, 5 aa, Homo sapiens
MKSFL

SEQ ID NO: 5323 - protein, 5 aa, Homo sapiens
DCREG

SEQ ID NO: 5324 - protein, 5 aa, Homo sapiens
EQRDH

SEQ ID NO: 5325 - protein, 5 aa, Homo sapiens
GESEE

SEQ ID NO: 5326 - protein, 5 aa, Homo sapiens
LPIQA

SEQ ID NO: 5327 - protein, 5 aa, Homo sapiens
ITMLL

SEQ ID NO: 5328 - protein, 5 aa, Homo sapiens
TMPLV

SEQ ID NO: 5329 - protein, 5 aa, Homo sapiens
QKGGQ

SEQ ID NO: 5330 - protein, 5 aa, Homo sapiens
VQNED

SEQ ID NO: 5331 - protein, 5 aa, Homo sapiens
NTLHR

SEQ ID NO: 5332 - protein, 5 aa, Homo sapiens
VYKGE

SEQ ID NO: 5333 - protein, 5 aa, Homo sapiens
CMHTN

SEQ ID NO: 5334 - protein, 5 aa, Homo sapiens
DSSEV

SEQ ID NO: 5335 - protein, 5 aa, Homo sapiens
FYQTV

SEQ ID NO: 5336 - protein, 5 aa, Homo sapiens
GEVKK

SEQ ID NO: 5337 - protein, 5 aa, Homo sapiens
GSHKA

SEQ ID NO: 5338 - protein, 5 aa, Homo sapiens
SGKQT

SEQ ID NO: 5339 - protein, 5 aa, Homo sapiens
TLNSD

SEQ ID NO: 5340 - protein, 5 aa, Homo sapiens
LTLMK

SEQ ID NO: 5341 - protein, 5 aa, Homo sapiens
QPTSC

SEQ ID NO: 5342 - protein, 5 aa, Homo sapiens
EEDKL

SEQ ID NO: 5343 - protein, 5 aa, Homo sapiens
SDGLS

SEQ ID NO: 5344 - protein, 5 aa, Homo sapiens
PQLLR

SEQ ID NO: 5345 - protein, 5 aa, Homo sapiens
MKKTM

SEQ ID NO: 5346 - protein, 5 aa, Homo sapiens
MLTEV

SEQ ID NO: 5347 - protein, 5 aa, Homo sapiens
EVFED

SEQ ID NO: 5348 - protein, 5 aa, Homo sapiens
KFSDL

SEQ ID NO: 5349 - protein, 5 aa, Homo sapiens
CIAGL

SEQ ID NO: 5350 - protein, 5 aa, Homo sapiens
KDLIF

SEQ ID NO: 5351 - protein, 5 aa, Homo sapiens
KELKL

SEQ ID NO: 5352 - protein, 5 aa, Homo sapiens
LTKAN

SEQ ID NO: 5353 - protein, 5 aa, Homo sapiens
SKKKK

SEQ ID NO: 5354 - protein, 5 aa, Homo sapiens
KDKSD

SEQ ID NO: 5355 - protein, 5 aa, Homo sapiens
KGSVV

SEQ ID NO: 5356 - protein, 5 aa, Homo sapiens
KKSHS

SEQ ID NO: 5357 - protein, 5 aa, Homo sapiens
KVSWD

SEQ ID NO: 5358 - protein, 5 aa, Homo sapiens
ASDVE

SEQ ID NO: 5359 - protein, 5 aa, Homo sapiens
VAYNM

SEQ ID NO: 5360 - protein, 5 aa, Homo sapiens
NRFVV

SEQ ID NO: 5361 - protein, 5 aa, Homo sapiens
ACMKR

SEQ ID NO: 5362 - protein, 5 aa, Homo sapiens
PDECV

SEQ ID NO: 5363 - protein, 5 aa, Homo sapiens
RNMHR

SEQ ID NO: 5364 - protein, 5 aa, Homo sapiens
VSVPP

SEQ ID NO: 5365 - protein, 5 aa, Homo sapiens
RRKED

SEQ ID NO: 5366 - protein, 5 aa, Homo sapiens
TGQVW

SEQ ID NO: 5367 - protein, 5 aa, Homo sapiens
FHPIR

SEQ ID NO: 5368 - protein, 5 aa, Homo sapiens
HSCLL

SEQ ID NO: 5369 - protein, 5 aa, Homo sapiens
HARTC

SEQ ID NO: 5370 - protein, 5 aa, Homo sapiens
RAQSA

SEQ ID NO: 5371 - protein, 5 aa, Homo sapiens
PSPSE

SEQ ID NO: 5372 - protein, 5 aa, Homo sapiens
KRKLT

SEQ ID NO: 5373 - protein, 5 aa, Homo sapiens
EEYGS

SEQ ID NO: 5374 - protein, 5 aa, Homo sapiens
KETPL

SEQ ID NO: 5375 - protein, 5 aa, Homo sapiens
FAGGN

SEQ ID NO: 5376 - protein, 5 aa, Homo sapiens
QQEDD

SEQ ID NO: 5377 - protein, 5 aa, Homo sapiens
NLENI

SEQ ID NO: 5378 - protein, 5 aa, Homo sapiens
EKCDI

SEQ ID NO: 5379 - protein, 5 aa, Homo sapiens
DIGGR

SEQ ID NO: 5380 - protein, 5 aa, Homo sapiens
PYGRY

SEQ ID NO: 5381 - protein, 5 aa, Homo sapiens
NVSKS

SEQ ID NO: 5382 - protein, 5 aa, Homo sapiens
EGSSH

SEQ ID NO: 5383 - protein, 5 aa, Homo sapiens
SLLQE

SEQ ID NO: 5384 - protein, 5 aa, Homo sapiens
NNCRQ

SEQ ID NO: 5385 - protein, 5 aa, Homo sapiens
LKTAN

SEQ ID NO: 5386 - protein, 5 aa, Homo sapiens
LNLIL

SEQ ID NO: 5387 - protein, 5 aa, Homo sapiens
TPAYF

SEQ ID NO: 5388 - protein, 5 aa, Homo sapiens
HRQAS

SEQ ID NO: 5389 - protein, 5 aa, Homo sapiens
VASQI

SEQ ID NO: 5390 - protein, 5 aa, Homo sapiens
YSAGI

SEQ ID NO: 5391 - protein, 5 aa, Homo sapiens
GRSFC

SEQ ID NO: 5392 - protein, 5 aa, Homo sapiens
TYKNN

SEQ ID NO: 5393 - protein, 5 aa, Homo sapiens
AAGGH

SEQ ID NO: 5394 - protein, 5 aa, Homo sapiens
HFIAD

SEQ ID NO: 5395 - protein, 5 aa, Homo sapiens
PPPLS

SEQ ID NO: 5396 - protein, 5 aa, Homo sapiens
GSDEE

SEQ ID NO: 5397 - protein, 5 aa, Homo sapiens
PADDV

SEQ ID NO: 5398 - protein, 5 aa, Homo sapiens
LLDQG

SEQ ID NO: 5399 - protein, 5 aa, Homo sapiens
STIKV

SEQ ID NO: 5400 - protein, 5 aa, Homo sapiens
IKKYV

SEQ ID NO: 5401 - protein, 5 aa, Homo sapiens
TWTVY

SEQ ID NO: 5402 - protein, 5 aa, Homo sapiens
KPPHP

SEQ ID NO: 5403 - protein, 5 aa, Homo sapiens
GVSPC

SEQ ID NO: 5404 - protein, 5 aa, Homo sapiens
AQHWV

SEQ ID NO: 5405 - protein, 5 aa, Homo sapiens
LFAPY

SEQ ID NO: 5406 - protein, 5 aa, Homo sapiens
SDESD

SEQ ID NO: 5407 - protein, 5 aa, Homo sapiens
SSIFV

SEQ ID NO: 5408 - protein, 5 aa, Homo sapiens
TQSSK

SEQ ID NO: 5409 - protein, 5 aa, Homo sapiens
REFSR

SEQ ID NO: 5410 - protein, 5 aa, Homo sapiens
GVPTV

SEQ ID NO: 5411 - protein, 5 aa, Homo sapiens
KSRKK

SEQ ID NO: 5412 - protein, 5 aa, Homo sapiens
SKRAR

SEQ ID NO: 5413 - protein, 5 aa, Homo sapiens
QTATG

SEQ ID NO: 5414 - protein, 5 aa, Homo sapiens
ESLSR

SEQ ID NO: 5415 - protein, 5 aa, Homo sapiens
GSTED

SEQ ID NO: 5416 - protein, 5 aa, Homo sapiens
DVDMK

SEQ ID NO: 5417 - protein, 5 aa, Homo sapiens
QASFF

SEQ ID NO: 5418 - protein, 5 aa, Homo sapiens
CSKVN

SEQ ID NO: 5419 - protein, 5 aa, Homo sapiens
FHFPP

SEQ ID NO: 5420 - protein, 5 aa, Homo sapiens
VKKNR

SEQ ID NO: 5421 - protein, 5 aa, Homo sapiens
LKSHF

SEQ ID NO: 5422 - protein, 5 aa, Homo sapiens
VIFPQ

SEQ ID NO: 5423 - protein, 5 aa, Homo sapiens
RMVPV

SEQ ID NO: 5424 - protein, 5 aa, Homo sapiens
VGPFL

SEQ ID NO: 5425 - protein, 5 aa, Homo sapiens
IHQNS

SEQ ID NO: 5426 - protein, 5 aa, Homo sapiens
EFCVL

SEQ ID NO: 5427 - protein, 5 aa, Homo sapiens
TRGST

SEQ ID NO: 5428 - protein, 5 aa, Homo sapiens
DSKEI

SEQ ID NO: 5429 - protein, 5 aa, Homo sapiens
LGHRL

SEQ ID NO: 5430 - protein, 5 aa, Homo sapiens
CKDCL

SEQ ID NO: 5431 - protein, 5 aa, Homo sapiens
YEMFE

SEQ ID NO: 5432 - protein, 5 aa, Homo sapiens
IMNIL

SEQ ID NO: 5433 - protein, 5 aa, Homo sapiens
EVTCT

SEQ ID NO: 5434 - protein, 5 aa, Homo sapiens
LTASQ

SEQ ID NO: 5435 - protein, 5 aa, Homo sapiens
RDSTV

SEQ ID NO: 5436 - protein, 5 aa, Homo sapiens
KATKS

SEQ ID NO: 5437 - protein, 5 aa, Homo sapiens
KETRV

SEQ ID NO: 5438 - protein, 5 aa, Homo sapiens
RGTSI

SEQ ID NO: 5439 - protein, 5 aa, Homo sapiens
DSKRS

SEQ ID NO: 5440 - protein, 5 aa, Homo sapiens
SEVLP

SEQ ID NO: 5441 - protein, 5 aa, Homo sapiens
NKHAG

SEQ ID NO: 5442 - protein, 5 aa, Homo sapiens
LDHIR

SEQ ID NO: 5443 - protein, 5 aa, Homo sapiens
SLLYQ

SEQ ID NO: 5444 - protein, 5 aa, Homo sapiens
AGFEA

SEQ ID NO: 5445 - protein, 5 aa, Homo sapiens
DMMEL

SEQ ID NO: 5446 - protein, 5 aa, Homo sapiens
RKYLL

SEQ ID NO: 5447 - protein, 5 aa, Homo sapiens
ATVYN

SEQ ID NO: 5448 - protein, 5 aa, Homo sapiens
KAKSQ

SEQ ID NO: 5449 - protein, 5 aa, Homo sapiens
ADEEE

SEQ ID NO: 5450 - protein, 5 aa, Homo sapiens
TKSAH

SEQ ID NO: 5451 - protein, 5 aa, Homo sapiens
VVDLY

SEQ ID NO: 5452 - protein, 5 aa, Homo sapiens
TSGDR

SEQ ID NO: 5453 - protein, 5 aa, Homo sapiens
YQTLL

SEQ ID NO: 5454 - protein, 5 aa, Homo sapiens
ERNVP

SEQ ID NO: 5455 - protein, 5 aa, Homo sapiens
IKVVD

SEQ ID NO: 5456 - protein, 5 aa, Homo sapiens
VGYIW

SEQ ID NO: 5457 - protein, 5 aa, Homo sapiens
IKVNL

SEQ ID NO: 5458 - protein, 5 aa, Homo sapiens
RETSL

SEQ ID NO: 5459 - protein, 5 aa, Homo sapiens
KSKNY

SEQ ID NO: 5460 - protein, 5 aa, Homo sapiens
DENGK

SEQ ID NO: 5461 - protein, 5 aa, Homo sapiens
KAHRT

SEQ ID NO: 5462 - protein, 5 aa, Homo sapiens
KVHTG

SEQ ID NO: 5463 - protein, 5 aa, Homo sapiens
TGEIQ

SEQ ID NO: 5464 - protein, 5 aa, Homo sapiens
NVHKG

SEQ ID NO: 5465 - protein, 5 aa, Homo sapiens
AHGHM

SEQ ID NO: 5466 - protein, 5 aa, Homo sapiens
GRAAP

SEQ ID NO: 5467 - protein, 5 aa, Homo sapiens
YQSRD

SEQ ID NO: 5468 - protein, 5 aa, Homo sapiens
ILPEY

SEQ ID NO: 5469 - protein, 5 aa, Homo sapiens
HNGLD

SEQ ID NO: 5470 - protein, 5 aa, Homo sapiens
YQEDM

SEQ ID NO: 5471 - protein, 5 aa, Homo sapiens
SISDD

SEQ ID NO: 5472 - protein, 5 aa, Homo sapiens
STPPI

SEQ ID NO: 5473 - protein, 5 aa, Homo sapiens
GPTLL

SEQ ID NO: 5474 - protein, 5 aa, Homo sapiens
SGEKI

SEQ ID NO: 5475 - protein, 5 aa, Homo sapiens
FLTWL

SEQ ID NO: 5476 - protein, 5 aa, Homo sapiens
YIQVI

SEQ ID NO: 5477 - protein, 5 aa, Homo sapiens
ENLLF

SEQ ID NO: 5478 - protein, 5 aa, Homo sapiens
YVTQM

SEQ ID NO: 5479 - protein, 5 aa, Homo sapiens
HRNSS

SEQ ID NO: 5480 - protein, 5 aa, Homo sapiens
ASDLP

SEQ ID NO: 5481 - protein, 5 aa, Homo sapiens
KVKET

SEQ ID NO: 5482 - protein, 5 aa, Homo sapiens
VLLEQ

SEQ ID NO: 5483 - protein, 5 aa, Homo sapiens
DGTSS

SEQ ID NO: 5484 - protein, 5 aa, Homo sapiens
LGKDM

SEQ ID NO: 5485 - protein, 5 aa, Homo sapiens
HPEHT

SEQ ID NO: 5486 - protein, 5 aa, Homo sapiens
RFQVL

SEQ ID NO: 5487 - protein, 5 aa, Homo sapiens
DDLEI

SEQ ID NO: 5488 - protein, 5 aa, Homo sapiens
PEKKN

SEQ ID NO: 5489 - protein, 5 aa, Homo sapiens
PPSSK

SEQ ID NO: 5490 - protein, 5 aa, Homo sapiens
GYETQ

SEQ ID NO: 5491 - protein, 5 aa, Homo sapiens
KKMEK

SEQ ID NO: 5492 - protein, 5 aa, Homo sapiens
GVLAS

SEQ ID NO: 5493 - protein, 5 aa, Homo sapiens
AQYID

SEQ ID NO: 5494 - protein, 5 aa, Homo sapiens
KVDEK

SEQ ID NO: 5495 - protein, 5 aa, Homo sapiens
IIFIL

SEQ ID NO: 5496 - protein, 5 aa, Homo sapiens
GYGTF

SEQ ID NO: 5497 - protein, 5 aa, Homo sapiens
AVYLE

SEQ ID NO: 5498 - protein, 5 aa, Homo sapiens
RCEAV

SEQ ID NO: 5499 - protein, 5 aa, Homo sapiens
SCACR

SEQ ID NO: 5500 - protein, 5 aa, Homo sapiens
YFNAG

SEQ ID NO: 5501 - protein, 5 aa, Homo sapiens
SSSTL

SEQ ID NO: 5502 - protein, 5 aa, Homo sapiens
KEENE

SEQ ID NO: 5503 - protein, 5 aa, Homo sapiens
CTRKI

SEQ ID NO: 5504 - protein, 5 aa, Homo sapiens
PNCAC

SEQ ID NO: 5505 - protein, 5 aa, Homo sapiens
ESQKQ

SEQ ID NO: 5506 - protein, 5 aa, Homo sapiens
EGIYV

SEQ ID NO: 5507 - protein, 5 aa, Homo sapiens
SLPDS

SEQ ID NO: 5508 - protein, 5 aa, Homo sapiens
SFIDP

SEQ ID NO: 5509 - protein, 5 aa, Homo sapiens
RGCSS

SEQ ID NO: 5510 - protein, 5 aa, Homo sapiens
KLKFM

SEQ ID NO: 5511 - protein, 5 aa, Homo sapiens
NEWYV

SEQ ID NO: 5512 - protein, 5 aa, Homo sapiens
LEHLY

SEQ ID NO: 5513 - protein, 5 aa, Homo sapiens
GKKKK

SEQ ID NO: 5514 - protein, 5 aa, Homo sapiens
IQEKI

SEQ ID NO: 5515 - protein, 5 aa, Homo sapiens
NVDMM

SEQ ID NO: 5516 - protein, 5 aa, Homo sapiens
LVGHT

SEQ ID NO: 5517 - protein, 5 aa, Homo sapiens
NLISS

SEQ ID NO: 5518 - protein, 5 aa, Homo sapiens
NLKTP

SEQ ID NO: 5519 - protein, 5 aa, Homo sapiens
SFWGE

SEQ ID NO: 5520 - protein, 5 aa, Homo sapiens
MTGDI

SEQ ID NO: 5521 - protein, 5 aa, Homo sapiens
RLIKA

SEQ ID NO: 5522 - protein, 5 aa, Homo sapiens
KKLKL

SEQ ID NO: 5523 - protein, 5 aa, Homo sapiens
STQTS

SEQ ID NO: 5524 - protein, 5 aa, Homo sapiens
ACGCH

SEQ ID NO: 5525 - protein, 5 aa, Homo sapiens
RTRHS

SEQ ID NO: 5526 - protein, 5 aa, Homo sapiens
ECGQI

SEQ ID NO: 5527 - protein, 5 aa, Homo sapiens
SEKIM

SEQ ID NO: 5528 - protein, 5 aa, Homo sapiens
EKSDQ

SEQ ID NO: 5529 - protein, 5 aa, Homo sapiens
LSTDC

SEQ ID NO: 5530 - protein, 5 aa, Homo sapiens
RENQK

SEQ ID NO: 5531 - protein, 5 aa, Homo sapiens
RESKK

SEQ ID NO: 5532 - protein, 5 aa, Homo sapiens
RTVQS

SEQ ID NO: 5533 - protein, 5 aa, Homo sapiens
EMETL

SEQ ID NO: 5534 - protein, 5 aa, Homo sapiens
RHFTM

SEQ ID NO: 5535 - protein, 5 aa, Homo sapiens
FVSNE

SEQ ID NO: 5536 - protein, 5 aa, Homo sapiens
QEFVV

SEQ ID NO: 5537 - protein, 5 aa, Homo sapiens
IISNV

SEQ ID NO: 5538 - protein, 5 aa, Homo sapiens
ELQEV

SEQ ID NO: 5539 - protein, 5 aa, Homo sapiens
LVGVK

SEQ ID NO: 5540 - protein, 5 aa, Homo sapiens
RKKLD

SEQ ID NO: 5541 - protein, 5 aa, Homo sapiens
DFNLL

SEQ ID NO: 5542 - protein, 5 aa, Homo sapiens
AESED

SEQ ID NO: 5543 - protein, 5 aa, Homo sapiens
MEAER

SEQ ID NO: 5544 - protein, 5 aa, Homo sapiens
QSVGL

SEQ ID NO: 5545 - protein, 5 aa, Homo sapiens
SSFTM

SEQ ID NO: 5546 - protein, 5 aa, Homo sapiens
FPMGQ

SEQ ID NO: 5547 - protein, 5 aa, Homo sapiens
QLIDT

SEQ ID NO: 5548 - protein, 5 aa, Homo sapiens
SQGSQ

SEQ ID NO: 5549 - protein, 5 aa, Homo sapiens
CCVIL

SEQ ID NO: 5550 - protein, 5 aa, Homo sapiens
HIILK

SEQ ID NO: 5551 - protein, 5 aa, Homo sapiens
KQIFF

SEQ ID NO: 5552 - protein, 5 aa, Homo sapiens
SARYV

SEQ ID NO: 5553 - protein, 5 aa, Homo sapiens
GMEQS

SEQ ID NO: 5554 - protein, 5 aa, Homo sapiens
EKPFC

SEQ ID NO: 5555 - protein, 5 aa, Homo sapiens
RTGDS

SEQ ID NO: 5556 - protein, 5 aa, Homo sapiens
RYTFT

SEQ ID NO: 5557 - protein, 5 aa, Homo sapiens
QLGFF

SEQ ID NO: 5558 - protein, 5 aa, Homo sapiens
RFSSP

SEQ ID NO: 5559 - protein, 5 aa, Homo sapiens
PAEPN

SEQ ID NO: 5560 - protein, 5 aa, Homo sapiens
EDLFE

SEQ ID NO: 5561 - protein, 5 aa, Homo sapiens
SKMKP

SEQ ID NO: 5562 - protein, 5 aa, Homo sapiens
YYFYN

SEQ ID NO: 5563 - protein, 5 aa, Homo sapiens
QQTGI

SEQ ID NO: 5564 - protein, 5 aa, Homo sapiens
NFNFS

SEQ ID NO: 5565 - protein, 5 aa, Homo sapiens
RKMQQ

SEQ ID NO: 5566 - protein, 5 aa, Homo sapiens
YTEAW

SEQ ID NO: 5567 - protein, 5 aa, Homo sapiens
VESQM

SEQ ID NO: 5568 - protein, 5 aa, Homo sapiens
REKQP

SEQ ID NO: 5569 - protein, 5 aa, Homo sapiens
AQPVR

SEQ ID NO: 5570 - protein, 5 aa, Homo sapiens
PQPGF

SEQ ID NO: 5571 - protein, 5 aa, Homo sapiens
DNAGQ

SEQ ID NO: 5572 - protein, 5 aa, Homo sapiens
VQDVL

SEQ ID NO: 5573 - protein, 5 aa, Homo sapiens
KKVDS

SEQ ID NO: 5574 - protein, 5 aa, Homo sapiens
REVSS

SEQ ID NO: 5575 - protein, 5 aa, Homo sapiens
SSRKT

SEQ ID NO: 5576 - protein, 5 aa, Homo sapiens
EAPNL

SEQ ID NO: 5577 - protein, 5 aa, Homo sapiens
IKATE

SEQ ID NO: 5578 - protein, 5 aa, Homo sapiens
TNGYH

SEQ ID NO: 5579 - protein, 5 aa, Homo sapiens
RHRLV

SEQ ID NO: 5580 - protein, 5 aa, Homo sapiens
FGWDG

SEQ ID NO: 5581 - protein, 5 aa, Homo sapiens
HNFSA

SEQ ID NO: 5582 - protein, 5 aa, Homo sapiens
RAVAT

SEQ ID NO: 5583 - protein, 5 aa, Homo sapiens
LNLEI

SEQ ID NO: 5584 - protein, 5 aa, Homo sapiens
QPVHL

SEQ ID NO: 5585 - protein, 5 aa, Homo sapiens
KRNEH

SEQ ID NO: 5586 - protein, 5 aa, Homo sapiens
TTPFL

SEQ ID NO: 5587 - protein, 5 aa, Homo sapiens
DFMSL

SEQ ID NO: 5588 - protein, 5 aa, Homo sapiens
IDPEA

SEQ ID NO: 5589 - protein, 5 aa, Homo sapiens
ESKTK

SEQ ID NO: 5590 - protein, 5 aa, Homo sapiens
INFFI

SEQ ID NO: 5591 - protein, 5 aa, Homo sapiens
REENE

SEQ ID NO: 5592 - protein, 5 aa, Homo sapiens
TLLQE

SEQ ID NO: 5593 - protein, 5 aa, Homo sapiens
EETSL

SEQ ID NO: 5594 - protein, 5 aa, Homo sapiens
RGKLF

SEQ ID NO: 5595 - protein, 5 aa, Homo sapiens
CDEHP

SEQ ID NO: 5596 - protein, 5 aa, Homo sapiens
GPSGD

SEQ ID NO: 5597 - protein, 5 aa, Homo sapiens
PDKVT

SEQ ID NO: 5598 - protein, 5 aa, Homo sapiens
RSVSL

SEQ ID NO: 5599 - protein, 5 aa, Homo sapiens
KPPTL

SEQ ID NO: 5600 - protein, 5 aa, Homo sapiens
IPGKW

SEQ ID NO: 5601 - protein, 5 aa, Homo sapiens
DAWVT

SEQ ID NO: 5602 - protein, 5 aa, Homo sapiens
LQSAV

SEQ ID NO: 5603 - protein, 5 aa, Homo sapiens
TRKRR

SEQ ID NO: 5604 - protein, 5 aa, Homo sapiens
IFQDF

SEQ ID NO: 5605 - protein, 5 aa, Homo sapiens
HSDEP

SEQ ID NO: 5606 - protein, 5 aa, Homo sapiens
LDETD

SEQ ID NO: 5607 - protein, 5 aa, Homo sapiens
LCKAA

SEQ ID NO: 5608 - protein, 5 aa, Homo sapiens
LIKTL

SEQ ID NO: 5609 - protein, 5 aa, Homo sapiens
SLVFQ

SEQ ID NO: 5610 - protein, 5 aa, Homo sapiens
SMMNW

SEQ ID NO: 5611 - protein, 5 aa, Homo sapiens
RFSLC

SEQ ID NO: 5612 - protein, 5 aa, Homo sapiens
QCQFS

SEQ ID NO: 5613 - protein, 5 aa, Homo sapiens
KTVKL

SEQ ID NO: 5614 - protein, 5 aa, Homo sapiens
TLAPQ

SEQ ID NO: 5615 - protein, 5 aa, Homo sapiens
KIFRF

SEQ ID NO: 5616 - protein, 5 aa, Homo sapiens
KSNTA

SEQ ID NO: 5617 - protein, 5 aa, Homo sapiens
SVKKK

SEQ ID NO: 5618 - protein, 5 aa, Homo sapiens
YSARA

SEQ ID NO: 5619 - protein, 5 aa, Homo sapiens
TFQRK

SEQ ID NO: 5620 - protein, 5 aa, Homo sapiens
QNHLE

SEQ ID NO: 5621 - protein, 5 aa, Homo sapiens
FVENI

SEQ ID NO: 5622 - protein, 5 aa, Homo sapiens
KLSKL

SEQ ID NO: 5623 - protein, 5 aa, Homo sapiens
LPVSE

SEQ ID NO: 5624 - protein, 5 aa, Homo sapiens
LGFTW

SEQ ID NO: 5625 - protein, 5 aa, Homo sapiens
RCTLQ

SEQ ID NO: 5626 - protein, 5 aa, Homo sapiens
QRNAV

SEQ ID NO: 5627 - protein, 5 aa, Homo sapiens
QPKKK

SEQ ID NO: 5628 - protein, 5 aa, Homo sapiens
ILFAM

SEQ ID NO: 5629 - protein, 5 aa, Homo sapiens
WIQHR

SEQ ID NO: 5630 - protein, 5 aa, Homo sapiens
LYPKA

SEQ ID NO: 5631 - protein, 5 aa, Homo sapiens
YVKRL

SEQ ID NO: 5632 - protein, 5 aa, Homo sapiens
NFLDC

SEQ ID NO: 5633 - protein, 5 aa, Homo sapiens
QPNSN

SEQ ID NO: 5634 - protein, 5 aa, Homo sapiens
QAGES

SEQ ID NO: 5635 - protein, 5 aa, Homo sapiens
DGSIV

SEQ ID NO: 5636 - protein, 5 aa, Homo sapiens
LPINN

SEQ ID NO: 5637 - protein, 5 aa, Homo sapiens
QSFLH

SEQ ID NO: 5638 - protein, 5 aa, Homo sapiens
DDSKA

SEQ ID NO: 5639 - protein, 5 aa, Homo sapiens
QEVRG

SEQ ID NO: 5640 - protein, 5 aa, Homo sapiens
NWNRK

SEQ ID NO: 5641 - protein, 5 aa, Homo sapiens
RNHHG

SEQ ID NO: 5642 - protein, 5 aa, Homo sapiens
EQMQN

SEQ ID NO: 5643 - protein, 5 aa, Homo sapiens
MAECS

SEQ ID NO: 5644 - protein, 5 aa, Homo sapiens
LLKKC

SEQ ID NO: 5645 - protein, 5 aa, Homo sapiens
DQDDL

SEQ ID NO: 5646 - protein, 5 aa, Homo sapiens
LYIFL

SEQ ID NO: 5647 - protein, 5 aa, Homo sapiens
MYTCK

SEQ ID NO: 5648 - protein, 5 aa, Homo sapiens
PFEQL

SEQ ID NO: 5649 - protein, 5 aa, Homo sapiens
AAGNS

SEQ ID NO: 5650 - protein, 5 aa, Homo sapiens
FLNEV

SEQ ID NO: 5651 - protein, 5 aa, Homo sapiens
DASVL

SEQ ID NO: 5652 - protein, 5 aa, Homo sapiens
SESRN

SEQ ID NO: 5653 - protein, 5 aa, Homo sapiens
ELVKC

SEQ ID NO: 5654 - protein, 5 aa, Homo sapiens
FEKWW

SEQ ID NO: 5655 - protein, 5 aa, Homo sapiens
IQSTA

SEQ ID NO: 5656 - protein, 5 aa, Homo sapiens
DETGE

SEQ ID NO: 5657 - protein, 5 aa, Homo sapiens
SSADR

SEQ ID NO: 5658 - protein, 5 aa, Homo sapiens
RYVIT

SEQ ID NO: 5659 - protein, 5 aa, Homo sapiens
REKTN

SEQ ID NO: 5660 - protein, 5 aa, Homo sapiens
KIVNS

SEQ ID NO: 5661 - protein, 5 aa, Homo sapiens
PESSF

SEQ ID NO: 5662 - protein, 5 aa, Homo sapiens
GGCSC

SEQ ID NO: 5663 - protein, 5 aa, Homo sapiens
DAGLA

SEQ ID NO: 5664 - protein, 5 aa, Homo sapiens
SKLTY

SEQ ID NO: 5665 - protein, 5 aa, Homo sapiens
TEEQP

SEQ ID NO: 5666 - protein, 5 aa, Homo sapiens
GLVGC

SEQ ID NO: 5667 - protein, 5 aa, Homo sapiens
ISSAQ

SEQ ID NO: 5668 - protein, 5 aa, Homo sapiens
VCQKI

SEQ ID NO: 5669 - protein, 5 aa, Homo sapiens
REYFI

SEQ ID NO: 5670 - protein, 5 aa, Homo sapiens
KASFK

SEQ ID NO: 5671 - protein, 5 aa, Homo sapiens
RASFK

SEQ ID NO: 5672 - protein, 5 aa, Homo sapiens
GLGRR

SEQ ID NO: 5673 - protein, 5 aa, Homo sapiens
YIPIL

SEQ ID NO: 5674 - protein, 5 aa, Homo sapiens
KRFRK

SEQ ID NO: 5675 - protein, 5 aa, Homo sapiens
RKMIL

SEQ ID NO: 5676 - protein, 5 aa, Homo sapiens
EHSFA

SEQ ID NO: 5677 - protein, 5 aa, Homo sapiens
TENCS

SEQ ID NO: 5678 - protein, 5 aa, Homo sapiens
VTIKA

SEQ ID NO: 5679 - protein, 5 aa, Homo sapiens
HFQQQ

SEQ ID NO: 5680 - protein, 5 aa, Homo sapiens
NSWKN

SEQ ID NO: 5681 - protein, 5 aa, Homo sapiens
KQEVA

SEQ ID NO: 5682 - protein, 5 aa, Homo sapiens
KTNFN

SEQ ID NO: 5683 - protein, 5 aa, Homo sapiens
PADGR

SEQ ID NO: 5684 - protein, 5 aa, Homo sapiens
LENGD

SEQ ID NO: 5685 - protein, 5 aa, Homo sapiens
QRLIL

SEQ ID NO: 5686 - protein, 5 aa, Homo sapiens
DDWES

SEQ ID NO: 5687 - protein, 5 aa, Homo sapiens
LNSKL

SEQ ID NO: 5688 - protein, 5 aa, Homo sapiens
SMASR

SEQ ID NO: 5689 - protein, 5 aa, Homo sapiens
RSSNQ

SEQ ID NO: 5690 - protein, 5 aa, Homo sapiens
HDTLG

SEQ ID NO: 5691 - protein, 5 aa, Homo sapiens
DPKSN

SEQ ID NO: 5692 - protein, 5 aa, Homo sapiens
KPVEI

SEQ ID NO: 5693 - protein, 5 aa, Homo sapiens
QTFCM

SEQ ID NO: 5694 - protein, 5 aa, Homo sapiens
SFSSE

SEQ ID NO: 5695 - protein, 5 aa, Homo sapiens
QTLGK

SEQ ID NO: 5696 - protein, 5 aa, Homo sapiens
NNMQQ

SEQ ID NO: 5697 - protein, 5 aa, Homo sapiens
GATGL

SEQ ID NO: 5698 - protein, 5 aa, Homo sapiens
PQGRR

SEQ ID NO: 5699 - protein, 5 aa, Homo sapiens
FHEEF

SEQ ID NO: 5700 - protein, 5 aa, Homo sapiens
YTIVS

SEQ ID NO: 5701 - protein, 5 aa, Homo sapiens
NGLCL

SEQ ID NO: 5702 - protein, 5 aa, Homo sapiens
RISRN

SEQ ID NO: 5703 - protein, 5 aa, Homo sapiens
CFIPV

SEQ ID NO: 5704 - protein, 5 aa, Homo sapiens
IHTLG

SEQ ID NO: 5705 - protein, 5 aa, Homo sapiens
GKSQV

SEQ ID NO: 5706 - protein, 5 aa, Homo sapiens
KEDRN

SEQ ID NO: 5707 - protein, 5 aa, Homo sapiens
RLDAK

SEQ ID NO: 5708 - protein, 5 aa, Homo sapiens
TKEEL

SEQ ID NO: 5709 - protein, 5 aa, Homo sapiens
SFWWS

SEQ ID NO: 5710 - protein, 5 aa, Homo sapiens
AIQIQ

SEQ ID NO: 5711 - protein, 5 aa, Homo sapiens
VSKVG

SEQ ID NO: 5712 - protein, 5 aa, Homo sapiens
AKLLW

SEQ ID NO: 5713 - protein, 5 aa, Homo sapiens
NPFAQ

SEQ ID NO: 5714 - protein, 5 aa, Homo sapiens
LISQV

SEQ ID NO: 5715 - protein, 5 aa, Homo sapiens
DALSL

SEQ ID NO: 5716 - protein, 5 aa, Homo sapiens
KGQES

SEQ ID NO: 5717 - protein, 5 aa, Homo sapiens
LMCGL

SEQ ID NO: 5718 - protein, 5 aa, Homo sapiens
IKRGY

SEQ ID NO: 5719 - protein, 5 aa, Homo sapiens
IKASS

SEQ ID NO: 5720 - protein, 5 aa, Homo sapiens
GETAV

SEQ ID NO: 5721 - protein, 5 aa, Homo sapiens
EELEC

SEQ ID NO: 5722 - protein, 5 aa, Homo sapiens
SLSSD

SEQ ID NO: 5723 - protein, 5 aa, Homo sapiens
NYQFC

SEQ ID NO: 5724 - protein, 5 aa, Homo sapiens
VHLAQ

SEQ ID NO: 5725 - protein, 5 aa, Homo sapiens
MNERP

SEQ ID NO: 5726 - protein, 5 aa, Homo sapiens
MPRHF

SEQ ID NO: 5727 - protein, 5 aa, Homo sapiens
LQKHF

SEQ ID NO: 5728 - protein, 5 aa, Homo sapiens
HREGF

SEQ ID NO: 5729 - protein, 5 aa, Homo sapiens
KSDLP

SEQ ID NO: 5730 - protein, 5 aa, Homo sapiens
VGKAS

SEQ ID NO: 5731 - protein, 5 aa, Homo sapiens
ITARA

SEQ ID NO: 5732 - protein, 5 aa, Homo sapiens
ILPGI

SEQ ID NO: 5733 - protein, 5 aa, Homo sapiens
AHVEV

SEQ ID NO: 5734 - protein, 5 aa, Homo sapiens
AVNKK

SEQ ID NO: 5735 - protein, 5 aa, Homo sapiens
TKNKA

SEQ ID NO: 5736 - protein, 5 aa, Homo sapiens
ETAAS

SEQ ID NO: 5737 - protein, 5 aa, Homo sapiens
GSLTI

SEQ ID NO: 5738 - protein, 5 aa, Homo sapiens
EEKGV

SEQ ID NO: 5739 - protein, 5 aa, Homo sapiens
DEDEL

SEQ ID NO: 5740 - protein, 5 aa, Homo sapiens
KKCGR

SEQ ID NO: 5741 - protein, 5 aa, Homo sapiens
LVSLA

SEQ ID NO: 5742 - protein, 5 aa, Homo sapiens
EYNLV

SEQ ID NO: 5743 - protein, 5 aa, Homo sapiens
SNYIW

SEQ ID NO: 5744 - protein, 5 aa, Homo sapiens
PRLES

SEQ ID NO: 5745 - protein, 5 aa, Homo sapiens
KKKRE

SEQ ID NO: 5746 - protein, 5 aa, Homo sapiens
MQEWV

SEQ ID NO: 5747 - protein, 5 aa, Homo sapiens
KPDFH

SEQ ID NO: 5748 - protein, 5 aa, Homo sapiens
PRFQP

SEQ ID NO: 5749 - protein, 5 aa, Homo sapiens
FLSTL

SEQ ID NO: 5750 - protein, 5 aa, Homo sapiens
STLER

SEQ ID NO: 5751 - protein, 5 aa, Homo sapiens
VCGKH

SEQ ID NO: 5752 - protein, 5 aa, Homo sapiens
LSRDI

SEQ ID NO: 5753 - protein, 5 aa, Homo sapiens
HSHLG

SEQ ID NO: 5754 - protein, 5 aa, Homo sapiens
SPGAH

SEQ ID NO: 5755 - protein, 5 aa, Homo sapiens
GLDTQ

SEQ ID NO: 5756 - protein, 5 aa, Homo sapiens
NPSRK

SEQ ID NO: 5757 - protein, 5 aa, Homo sapiens
SCQEG

SEQ ID NO: 5758 - protein, 5 aa, Homo sapiens
TICAQ

SEQ ID NO: 5759 - protein, 5 aa, Homo sapiens
KRKIP

SEQ ID NO: 5760 - protein, 5 aa, Homo sapiens
GQWDG

SEQ ID NO: 5761 - protein, 5 aa, Homo sapiens
GVEGQ

SEQ ID NO: 5762 - protein, 5 aa, Homo sapiens
DDQND

SEQ ID NO: 5763 - protein, 5 aa, Homo sapiens
SDSTS

SEQ ID NO: 5764 - protein, 5 aa, Homo sapiens
CTTDE

SEQ ID NO: 5765 - protein, 5 aa, Homo sapiens
STSYV

SEQ ID NO: 5766 - protein, 5 aa, Homo sapiens
RSQYV

SEQ ID NO: 5767 - protein, 5 aa, Homo sapiens
QYEMV

SEQ ID NO: 5768 - protein, 5 aa, Homo sapiens
LNTEI

SEQ ID NO: 5769 - protein, 5 aa, Homo sapiens
AEAPR

SEQ ID NO: 5770 - protein, 5 aa, Homo sapiens
EKCRE

SEQ ID NO: 5771 - protein, 5 aa, Homo sapiens
EQERL

SEQ ID NO: 5772 - protein, 5 aa, Homo sapiens
LTGKG

SEQ ID NO: 5773 - protein, 5 aa, Homo sapiens
APGHH

SEQ ID NO: 5774 - protein, 5 aa, Homo sapiens
REIYL

SEQ ID NO: 5775 - protein, 5 aa, Homo sapiens
SCGCR

SEQ ID NO: 5776 - protein, 5 aa, Homo sapiens
EWAKK

SEQ ID NO: 5777 - protein, 5 aa, Homo sapiens
FLKTL

SEQ ID NO: 5778 - protein, 5 aa, Homo sapiens
QTGEK

SEQ ID NO: 5779 - protein, 5 aa, Homo sapiens
NDSLR

SEQ ID NO: 5780 - protein, 5 aa, Homo sapiens
PRSKL

SEQ ID NO: 5781 - protein, 5 aa, Homo sapiens
MELWL

SEQ ID NO: 5782 - protein, 5 aa, Homo sapiens
ECGCL

SEQ ID NO: 5783 - protein, 5 aa, Homo sapiens
FVCSF

SEQ ID NO: 5784 - protein, 5 aa, Homo sapiens
CLGSN

SEQ ID NO: 5785 - protein, 5 aa, Homo sapiens
VDRPS

SEQ ID NO: 5786 - protein, 5 aa, Homo sapiens
YEISV

SEQ ID NO: 5787 - protein, 5 aa, Homo sapiens
QVYTN

SEQ ID NO: 5788 - protein, 5 aa, Homo sapiens
ANRPY

SEQ ID NO: 5789 - protein, 5 aa, Homo sapiens
SYMRR

SEQ ID NO: 5790 - protein, 5 aa, Homo sapiens
VLDNL

SEQ ID NO: 5791 - protein, 5 aa, Homo sapiens
RQNGL

SEQ ID NO: 5792 - protein, 5 aa, Homo sapiens
PKKYC

SEQ ID NO: 5793 - protein, 5 aa, Homo sapiens
NIHED

SEQ ID NO: 5794 - protein, 5 aa, Homo sapiens
EKKGL

SEQ ID NO: 5795 - protein, 5 aa, Homo sapiens
LSQGS

SEQ ID NO: 5796 - protein, 5 aa, Homo sapiens
HLLAA

SEQ ID NO: 5797 - protein, 5 aa, Homo sapiens
GSKNC

SEQ ID NO: 5798 - protein, 5 aa, Homo sapiens
FSCSR

SEQ ID NO: 5799 - protein, 5 aa, Homo sapiens
NLFKF

SEQ ID NO: 5800 - protein, 5 aa, Homo sapiens
HRHSE

SEQ ID NO: 5801 - protein, 5 aa, Homo sapiens
HCNLF

SEQ ID NO: 5802 - protein, 5 aa, Homo sapiens
RGNAH

SEQ ID NO: 5803 - protein, 5 aa, Homo sapiens
LGSCL

SEQ ID NO: 5804 - protein, 5 aa, Homo sapiens
QLPNS

SEQ ID NO: 5805 - protein, 5 aa, Homo sapiens
GYEHP

SEQ ID NO: 5806 - protein, 5 aa, Homo sapiens
GAEPQ

SEQ ID NO: 5807 - protein, 5 aa, Homo sapiens
NEWYV

SEQ ID NO: 5808 - protein, 5 aa, Homo sapiens
ELKCE

SEQ ID NO: 5809 - protein, 5 aa, Homo sapiens
PVTED

SEQ ID NO: 5810 - protein, 5 aa, Homo sapiens
HSQGP

SEQ ID NO: 5811 - protein, 5 aa, Homo sapiens
KLQVL

SEQ ID NO: 5812 - protein, 5 aa, Homo sapiens
ALLFQ

SEQ ID NO: 5813 - protein, 5 aa, Homo sapiens
RLFYV

SEQ ID NO: 5814 - protein, 5 aa, Homo sapiens
TFTSC

SEQ ID NO: 5815 - protein, 5 aa, Homo sapiens
FPFPP

SEQ ID NO: 5816 - protein, 5 aa, Homo sapiens
RLYSL

SEQ ID NO: 5817 - protein, 5 aa, Homo sapiens
LPLQS

SEQ ID NO: 5818 - protein, 5 aa, Homo sapiens
ENFLN

SEQ ID NO: 5819 - protein, 5 aa, Homo sapiens
KTRRT

SEQ ID NO: 5820 - protein, 5 aa, Homo sapiens
IRKPS

SEQ ID NO: 5821 - protein, 5 aa, Homo sapiens
SSPGS

SEQ ID NO: 5822 - protein, 5 aa, Homo sapiens
RIVTS

SEQ ID NO: 5823 - protein, 5 aa, Homo sapiens
INASG

SEQ ID NO: 5824 - protein, 5 aa, Homo sapiens
LENIV

SEQ ID NO: 5825 - protein, 5 aa, Homo sapiens
DGCKL

SEQ ID NO: 5826 - protein, 5 aa, Homo sapiens
KEAYI

SEQ ID NO: 5827 - protein, 5 aa, Homo sapiens
EPSPP

SEQ ID NO: 5828 - protein, 5 aa, Homo sapiens
CLTKM

SEQ ID NO: 5829 - protein, 5 aa, Homo sapiens
DIVQP

SEQ ID NO: 5830 - protein, 5 aa, Homo sapiens
YKDLY

SEQ ID NO: 5831 - protein, 5 aa, Homo sapiens
HYFSD

SEQ ID NO: 5832 - protein, 5 aa, Homo sapiens
ETETE

SEQ ID NO: 5833 - protein, 5 aa, Homo sapiens
QRDSR

SEQ ID NO: 5834 - protein, 5 aa, Homo sapiens
FSRQH

SEQ ID NO: 5835 - protein, 5 aa, Homo sapiens
RVTVM

SEQ ID NO: 5836 - protein, 5 aa, Homo sapiens
VSHTT

SEQ ID NO: 5837 - protein, 5 aa, Homo sapiens
GETTV

SEQ ID NO: 5838 - protein, 5 aa, Homo sapiens
TKKTA

SEQ ID NO: 5839 - protein, 5 aa, Homo sapiens
VANHL

SEQ ID NO: 5840 - protein, 5 aa, Homo sapiens
VIFPQ

SEQ ID NO: 5841 - protein, 5 aa, Homo sapiens
VLHKV

SEQ ID NO: 5842 - protein, 5 aa, Homo sapiens
DHCLG

SEQ ID NO: 5843 - protein, 5 aa, Homo sapiens
MKVND

SEQ ID NO: 5844 - protein, 5 aa, Homo sapiens
KKPRC

SEQ ID NO: 5845 - protein, 5 aa, Homo sapiens
WGPGS

SEQ ID NO: 5846 - protein, 5 aa, Homo sapiens
PFPHF

SEQ ID NO: 5847 - protein, 5 aa, Homo sapiens
DLHGK

SEQ ID NO: 5848 - protein, 5 aa, Homo sapiens
AAAQP

SEQ ID NO: 5849 - protein, 5 aa, Homo sapiens
FKNTE

SEQ ID NO: 5850 - protein, 5 aa, Homo sapiens
EKIAN

SEQ ID NO: 5851 - protein, 5 aa, Homo sapiens
SPFEA

SEQ ID NO: 5852 - protein, 5 aa, Homo sapiens
EGLLP

SEQ ID NO: 5853 - protein, 5 aa, Homo sapiens
YTSKF

SEQ ID NO: 5854 - protein, 5 aa, Homo sapiens
VHDDV

SEQ ID NO: 5855 - protein, 5 aa, Homo sapiens
CITTL

SEQ ID NO: 5856 - protein, 5 aa, Homo sapiens
GCCSL

SEQ ID NO: 5857 - protein, 5 aa, Homo sapiens
TPFYW

SEQ ID NO: 5858 - protein, 5 aa, Homo sapiens
MLFSR

SEQ ID NO: 5859 - protein, 5 aa, Homo sapiens
LIGRS

SEQ ID NO: 5860 - protein, 5 aa, Homo sapiens
PETPM

SEQ ID NO: 5861 - protein, 5 aa, Homo sapiens
YVTKI

SEQ ID NO: 5862 - protein, 5 aa, Homo sapiens
RESEA

SEQ ID NO: 5863 - protein, 5 aa, Homo sapiens
NESKV

SEQ ID NO: 5864 - protein, 5 aa, Homo sapiens
RKIII

SEQ ID NO: 5865 - protein, 5 aa, Homo sapiens
FPRQS

SEQ ID NO: 5866 - protein, 5 aa, Homo sapiens
TIKLS

SEQ ID NO: 5867 - protein, 5 aa, Homo sapiens
MPRYT

SEQ ID NO: 5868 - protein, 5 aa, Homo sapiens
LRRWW

SEQ ID NO: 5869 - protein, 5 aa, Homo sapiens
SSGAE

SEQ ID NO: 5870 - protein, 5 aa, Homo sapiens
LETAV

SEQ ID NO: 5871 - protein, 5 aa, Homo sapiens
SGFKL

SEQ ID NO: 5872 - protein, 5 aa, Homo sapiens
YIQSG

SEQ ID NO: 5873 - protein, 5 aa, Homo sapiens
PRKSQ

SEQ ID NO: 5874 - protein, 5 aa, Homo sapiens
AFPVH

SEQ ID NO: 5875 - protein, 5 aa, Homo sapiens
VCQVW

SEQ ID NO: 5876 - protein, 5 aa, Homo sapiens
TEEEL

SEQ ID NO: 5877 - protein, 5 aa, Homo sapiens
KQSSG

SEQ ID NO: 5878 - protein, 5 aa, Homo sapiens
RFLEV

SEQ ID NO: 5879 - protein, 5 aa, Homo sapiens
SSGIW

SEQ ID NO: 5880 - protein, 5 aa, Homo sapiens
RVPTK

SEQ ID NO: 5881 - protein, 5 aa, Homo sapiens
QDKQS

SEQ ID NO: 5882 - protein, 5 aa, Homo sapiens
AIPAN

SEQ ID NO: 5883 - protein, 5 aa, Homo sapiens
LRHYR

SEQ ID NO: 5884 - protein, 5 aa, Homo sapiens
ILRTD

SEQ ID NO: 5885 - protein, 5 aa, Homo sapiens
LNNPR

SEQ ID NO: 5886 - protein, 5 aa, Homo sapiens
HFWGC

SEQ ID NO: 5887 - protein, 5 aa, Homo sapiens
QRSWV

SEQ ID NO: 5888 - protein, 5 aa, Homo sapiens
DLAYT

SEQ ID NO: 5889 - protein, 5 aa, Homo sapiens
ECSKV

SEQ ID NO: 5890 - protein, 5 aa, Homo sapiens
GQDGQ

SEQ ID NO: 5891 - protein, 5 aa, Homo sapiens
QTPGI

SEQ ID NO: 5892 - protein, 5 aa, Homo sapiens
QVLCH

SEQ ID NO: 5893 - protein, 5 aa, Homo sapiens
TVNSE

SEQ ID NO: 5894 - protein, 5 aa, Homo sapiens
PKPGL

SEQ ID NO: 5895 - protein, 5 aa, Homo sapiens
DILEV

SEQ ID NO: 5896 - protein, 5 aa, Homo sapiens
VKHLS

SEQ ID NO: 5897 - protein, 5 aa, Homo sapiens
VVPGM

SEQ ID NO: 5898 - protein, 5 aa, Homo sapiens
HPGWP

SEQ ID NO: 5899 - protein, 5 aa, Homo sapiens
RMFAV

SEQ ID NO: 5900 - protein, 5 aa, Homo sapiens
LRTQV

SEQ ID NO: 5901 - protein, 5 aa, Homo sapiens
QQYLA

SEQ ID NO: 5902 - protein, 5 aa, Homo sapiens
QCVIL

SEQ ID NO: 5903 - protein, 5 aa, Homo sapiens
AEDYA

SEQ ID NO: 5904 - protein, 5 aa, Homo sapiens
KDYRS

SEQ ID NO: 5905 - protein, 5 aa, Homo sapiens
WLPCN

SEQ ID NO: 5906 - protein, 5 aa, Homo sapiens
LGSAS

SEQ ID NO: 5907 - protein, 5 aa, Homo sapiens
HRKTF

SEQ ID NO: 5908 - protein, 5 aa, Homo sapiens
LSPAN

SEQ ID NO: 5909 - protein, 5 aa, Homo sapiens
DNSDQ

SEQ ID NO: 5910 - protein, 5 aa, Homo sapiens
GMKRV

SEQ ID NO: 5911 - protein, 5 aa, Homo sapiens
GPSNF

SEQ ID NO: 5912 - protein, 5 aa, Homo sapiens
YTSSK

SEQ ID NO: 5913 - protein, 5 aa, Homo sapiens
YGFGG

SEQ ID NO: 5914 - protein, 5 aa, Homo sapiens
HTKNI

SEQ ID NO: 5915 - protein, 5 aa, Homo sapiens
TICPA

SEQ ID NO: 5916 - protein, 5 aa, Homo sapiens
VFEII

SEQ ID NO: 5917 - protein, 5 aa, Homo sapiens
CVQTS

SEQ ID NO: 5918 - protein, 5 aa, Homo sapiens
TKMSK

SEQ ID NO: 5919 - protein, 5 aa, Homo sapiens
RSGAA

SEQ ID NO: 5920 - protein, 5 aa, Homo sapiens
ADPWY

SEQ ID NO: 5921 - protein, 5 aa, Homo sapiens
EWKTI

SEQ ID NO: 5922 - protein, 5 aa, Homo sapiens
DSAPL

SEQ ID NO: 5923 - protein, 5 aa, Homo sapiens
KRCFC

SEQ ID NO: 5924 - protein, 5 aa, Homo sapiens
HLVYR

SEQ ID NO: 5925 - protein, 5 aa, Homo sapiens
WRWQS

SEQ ID NO: 5926 - protein, 5 aa, Homo sapiens
LTYRL

SEQ ID NO: 5927 - protein, 5 aa, Homo sapiens
FYPLS

SEQ ID NO: 5928 - protein, 5 aa, Homo sapiens
LASAV

SEQ ID NO: 5929 - protein, 5 aa, Homo sapiens
ESPCT

SEQ ID NO: 5930 - protein, 5 aa, Homo sapiens
KQNTL

SEQ ID NO: 5931 - protein, 5 aa, Homo sapiens
NCSLC

SEQ ID NO: 5932 - protein, 5 aa, Homo sapiens
NGRQF

SEQ ID NO: 5933 - protein, 5 aa, Homo sapiens
EDSRV

SEQ ID NO: 5934 - protein, 5 aa, Homo sapiens
AKKLV

SEQ ID NO: 5935 - protein, 5 aa, Homo sapiens
GEGQL

SEQ ID NO: 5936 - protein, 5 aa, Homo sapiens
VSEFS

SEQ ID NO: 5937 - protein, 5 aa, Homo sapiens
DRSRS

SEQ ID NO: 5938 - protein, 5 aa, Homo sapiens
DIKDF

SEQ ID NO: 5939 - protein, 5 aa, Homo sapiens
VQDLP

SEQ ID NO: 5940 - protein, 5 aa, Homo sapiens
LLSVT

SEQ ID NO: 5941 - protein, 5 aa, Homo sapiens
RGRTA

SEQ ID NO: 5942 - protein, 5 aa, Homo sapiens
EGAED

SEQ ID NO: 5943 - protein, 5 aa, Homo sapiens
GIPTN

SEQ ID NO: 5944 - protein, 5 aa, Homo sapiens
SSFLV

SEQ ID NO: 5945 - protein, 5 aa, Homo sapiens
VAESS

SEQ ID NO: 5946 - protein, 5 aa, Homo sapiens
PGARP

SEQ ID NO: 5947 - protein, 5 aa, Homo sapiens
KPEPT

SEQ ID NO: 5948 - protein, 5 aa, Homo sapiens
PGFKK

SEQ ID NO: 5949 - protein, 5 aa, Homo sapiens
PGPKR

SEQ ID NO: 5950 - protein, 5 aa, Homo sapiens
PEGQV

SEQ ID NO: 5951 - protein, 5 aa, Homo sapiens
WGYFA

SEQ ID NO: 5952 - protein, 5 aa, Homo sapiens
QIQIG

SEQ ID NO: 5953 - protein, 5 aa, Homo sapiens
MDPRR

SEQ ID NO: 5954 - protein, 5 aa, Homo sapiens
LHSYH

SEQ ID NO: 5955 - protein, 5 aa, Homo sapiens
ESTAL

SEQ ID NO: 5956 - protein, 5 aa, Homo sapiens
NLSVG

SEQ ID NO: 5957 - protein, 5 aa, Homo sapiens
YTCKH

SEQ ID NO: 5958 - protein, 5 aa, Homo sapiens
HRIFS

SEQ ID NO: 5959 - protein, 5 aa, Homo sapiens
ATCKS

SEQ ID NO: 5960 - protein, 5 aa, Homo sapiens
FVLYI

SEQ ID NO: 5961 - protein, 5 aa, Homo sapiens
KWRPR

SEQ ID NO: 5962 - protein, 5 aa, Homo sapiens
LKNQA

SEQ ID NO: 5963 - protein, 5 aa, Homo sapiens
LHTCR

SEQ ID NO: 5964 - protein, 5 aa, Homo sapiens
NKAVR

SEQ ID NO: 5965 - protein, 5 aa, Homo sapiens
QGPQS

SEQ ID NO: 5966 - protein, 5 aa, Homo sapiens
TVPDS

SEQ ID NO: 5967 - protein, 5 aa, Homo sapiens
SQAYA

SEQ ID NO: 5968 - protein, 5 aa, Homo sapiens
YQRHY

SEQ ID NO: 5969 - protein, 5 aa, Homo sapiens
VYHYG

SEQ ID NO: 5970 - protein, 5 aa, Homo sapiens
SHESA

SEQ ID NO: 5971 - protein, 5 aa, Homo sapiens
ARLVP

SEQ ID NO: 5972 - protein, 5 aa, Homo sapiens
KSGKP

SEQ ID NO: 5973 - protein, 5 aa, Homo sapiens
GRKIP

SEQ ID NO: 5974 - protein, 5 aa, Homo sapiens
NSATP

SEQ ID NO: 5975 - protein, 5 aa, Homo sapiens
MREIV

SEQ ID NO: 5976 - protein, 5 aa, Homo sapiens
FKMSP

SEQ ID NO: 5977 - protein, 5 aa, Homo sapiens
REALP

SEQ ID NO: 5978 - protein, 5 aa, Homo sapiens
QARRK

SEQ ID NO: 5979 - protein, 5 aa, Homo sapiens
RVEQW

SEQ ID NO: 5980 - protein, 5 aa, Homo sapiens
VVQNW

SEQ ID NO: 5981 - protein, 5 aa, Homo sapiens
HLLNL

SEQ ID NO: 5982 - protein, 5 aa, Homo sapiens
DSAYV

SEQ ID NO: 5983 - protein, 5 aa, Homo sapiens
EEEVA

SEQ ID NO: 5984 - protein, 5 aa, Homo sapiens
HRKCF

SEQ ID NO: 5985 - protein, 5 aa, Homo sapiens
EISST

SEQ ID NO: 5986 - protein, 5 aa, Homo sapiens
APKPR

SEQ ID NO: 5987 - protein, 5 aa, Homo sapiens
ITNGR

SEQ ID NO: 5988 - protein, 5 aa, Homo sapiens
QRNTN

SEQ ID NO: 5989 - protein, 5 aa, Homo sapiens
PRCAR

SEQ ID NO: 5990 - protein, 5 aa, Homo sapiens
GIMRC

SEQ ID NO: 5991 - protein, 5 aa, Homo sapiens
QEPPR

SEQ ID NO: 5992 - protein, 5 aa, Homo sapiens
VMQDT

SEQ ID NO: 5993 - protein, 5 aa, Homo sapiens
SEDFG

SEQ ID NO: 5994 - protein, 5 aa, Homo sapiens
PRAQT

SEQ ID NO: 5995 - protein, 5 aa, Homo sapiens
VREEL

SEQ ID NO: 5996 - protein, 5 aa, Homo sapiens
KATPP

SEQ ID NO: 5997 - protein, 5 aa, Homo sapiens
DPSRP

SEQ ID NO: 5998 - protein, 5 aa, Homo sapiens
ISGFE

SEQ ID NO: 5999 - protein, 5 aa, Homo sapiens
MAVSS

SEQ ID NO: 6000 - protein, 5 aa, Homo sapiens
GAEAG

SEQ ID NO: 6001 - protein, 5 aa, Homo sapiens
KSKYF

SEQ ID NO: 6002 - protein, 5 aa, Homo sapiens
FFCAP

SEQ ID NO: 6003 - protein, 5 aa, Homo sapiens
EAGQR

SEQ ID NO: 6004 - protein, 5 aa, Homo sapiens
MEEED

SEQ ID NO: 6005 - protein, 5 aa, Homo sapiens
ANRPY

SEQ ID NO: 6006 - protein, 5 aa, Homo sapiens
YAYMQ

SEQ ID NO: 6007 - protein, 5 aa, Homo sapiens
IPLPD

SEQ ID NO: 6008 - protein, 5 aa, Homo sapiens
KQQTS

SEQ ID NO: 6009 - protein, 5 aa, Homo sapiens
NWQLL

SEQ ID NO: 6010 - protein, 5 aa, Homo sapiens
HLQLW

SEQ ID NO: 6011 - protein, 5 aa, Homo sapiens
VAGAP

SEQ ID NO: 6012 - protein, 5 aa, Homo sapiens
PPKSK

SEQ ID NO: 6013 - protein, 5 aa, Homo sapiens
CSCCA

SEQ ID NO: 6014 - protein, 5 aa, Homo sapiens
PHFKH

SEQ ID NO: 6015 - protein, 5 aa, Homo sapiens
SPVET

SEQ ID NO: 6016 - protein, 5 aa, Homo sapiens
IARIP

SEQ ID NO: 6017 - protein, 5 aa, Homo sapiens
NSEPA

SEQ ID NO: 6018 - protein, 5 aa, Homo sapiens
LKKSR

SEQ ID NO: 6019 - protein, 5 aa, Homo sapiens
ISHIS

SEQ ID NO: 6020 - protein, 5 aa, Homo sapiens
DDAWK

SEQ ID NO: 6021 - protein, 5 aa, Homo sapiens
KSASS

SEQ ID NO: 6022 - protein, 5 aa, Homo sapiens
QQEQV

SEQ ID NO: 6023 - protein, 5 aa, Homo sapiens
LSPLL

SEQ ID NO: 6024 - protein, 5 aa, Homo sapiens
KTTRP

SEQ ID NO: 6025 - protein, 5 aa, Homo sapiens
ELRHS

SEQ ID NO: 6026 - protein, 5 aa, Homo sapiens
LTPWH

SEQ ID NO: 6027 - protein, 5 aa, Homo sapiens
RLLPD

SEQ ID NO: 6028 - protein, 5 aa, Homo sapiens
AIRTL

SEQ ID NO: 6029 - protein, 5 aa, Homo sapiens
PDNCV

SEQ ID NO: 6030 - protein, 5 aa, Homo sapiens
AAHKG

SEQ ID NO: 6031 - protein, 5 aa, Homo sapiens
ASDQL

SEQ ID NO: 6032 - protein, 5 aa, Homo sapiens
AKVKK

SEQ ID NO: 6033 - protein, 5 aa, Homo sapiens
YIPIF

SEQ ID NO: 6034 - protein, 5 aa, Homo sapiens
PCSRT

SEQ ID NO: 6035 - protein, 5 aa, Homo sapiens
IAANS

SEQ ID NO: 6036 - protein, 5 aa, Homo sapiens
ILKVE

SEQ ID NO: 6037 - protein, 5 aa, Homo sapiens
HNLAL

SEQ ID NO: 6038 - protein, 5 aa, Homo sapiens
QQYNG

SEQ ID NO: 6039 - protein, 5 aa, Homo sapiens
AEPLI

SEQ ID NO: 6040 - protein, 5 aa, Homo sapiens
LRARK

SEQ ID NO: 6041 - protein, 5 aa, Homo sapiens
TGGNL

SEQ ID NO: 6042 - protein, 5 aa, Homo sapiens
ENPYK

SEQ ID NO: 6043 - protein, 5 aa, Homo sapiens
KRSLT

SEQ ID NO: 6044 - protein, 5 aa, Homo sapiens
GPEQQ

SEQ ID NO: 6045 - protein, 5 aa, Homo sapiens
RISVL

SEQ ID NO: 6046 - protein, 5 aa, Homo sapiens
ACSLC

SEQ ID NO: 6047 - protein, 5 aa, Homo sapiens
MMTAK

SEQ ID NO: 6048 - protein, 5 aa, Homo sapiens
TEPPG

SEQ ID NO: 6049 - protein, 5 aa, Homo sapiens
RSTVA

SEQ ID NO: 6050 - protein, 5 aa, Homo sapiens
TVCFY

SEQ ID NO: 6051 - protein, 5 aa, Homo sapiens
NTVRI

SEQ ID NO: 6052 - protein, 5 aa, Homo sapiens
LRSKI

SEQ ID NO: 6053 - protein, 5 aa, Homo sapiens
QLRTQ

SEQ ID NO: 6054 - protein, 5 aa, Homo sapiens
TCTLR

SEQ ID NO: 6055 - protein, 5 aa, Homo sapiens
YGSGQ

SEQ ID NO: 6056 - protein, 5 aa, Homo sapiens
PPKNE

SEQ ID NO: 6057 - protein, 5 aa, Homo sapiens
TPLHV

SEQ ID NO: 6058 - protein, 5 aa, Homo sapiens
GRVRQ

SEQ ID NO: 6059 - protein, 5 aa, Homo sapiens
AECTF

SEQ ID NO: 6060 - protein, 5 aa, Homo sapiens
EDCHY

SEQ ID NO: 6061 - protein, 5 aa, Homo sapiens
EECEF

SEQ ID NO: 6062 - protein, 5 aa, Homo sapiens
SDLQD

SEQ ID NO: 6063 - protein, 5 aa, Homo sapiens
EGDCA

SEQ ID NO: 6064 - protein, 5 aa, Homo sapiens
SDSLQ

SEQ ID NO: 6065 - protein, 5 aa, Homo sapiens
RSGRF

SEQ ID NO: 6066 - protein, 5 aa, Homo sapiens
SAPSS

SEQ ID NO: 6067 - protein, 5 aa, Homo sapiens
LEHNV

SEQ ID NO: 6068 - protein, 5 aa, Homo sapiens
QATVL

SEQ ID NO: 6069 - protein, 5 aa, Homo sapiens
NPHKL

SEQ ID NO: 6070 - protein, 5 aa, Homo sapiens
ELTYF

SEQ ID NO: 6071 - protein, 5 aa, Homo sapiens
KKRRE

SEQ ID NO: 6072 - protein, 5 aa, Homo sapiens
FKKKE

SEQ ID NO: 6073 - protein, 5 aa, Homo sapiens
EVSVT

SEQ ID NO: 6074 - protein, 5 aa, Homo sapiens
EEMLA

SEQ ID NO: 6075 - protein, 5 aa, Homo sapiens
ELTGK

SEQ ID NO: 6076 - protein, 5 aa, Homo sapiens
APFPS

SEQ ID NO: 6077 - protein, 5 aa, Homo sapiens
IGPGP

SEQ ID NO: 6078 - protein, 5 aa, Homo sapiens
VGFIS

SEQ ID NO: 6079 - protein, 5 aa, Homo sapiens
DGGQL

SEQ ID NO: 6080 - protein, 5 aa, Homo sapiens
SRTTL

SEQ ID NO: 6081 - protein, 5 aa, Homo sapiens
PLFAW

SEQ ID NO: 6082 - protein, 5 aa, Homo sapiens
DMVDI

SEQ ID NO: 6083 - protein, 5 aa, Homo sapiens
TPGPP

SEQ ID NO: 6084 - protein, 5 aa, Homo sapiens
INIPK

SEQ ID NO: 6085 - protein, 5 aa, Homo sapiens
FPVCL

SEQ ID NO: 6086 - protein, 5 aa, Homo sapiens
PWEQI

SEQ ID NO: 6087 - protein, 5 aa, Homo sapiens
GGRRL

SEQ ID NO: 6088 - protein, 5 aa, Homo sapiens
VTGHH

SEQ ID NO: 6089 - protein, 5 aa, Homo sapiens
NETSF

SEQ ID NO: 6090 - protein, 5 aa, Homo sapiens
TDTSV

SEQ ID NO: 6091 - protein, 5 aa, Homo sapiens
NTQTL

SEQ ID NO: 6092 - protein, 5 aa, Homo sapiens
QPLPR

SEQ ID NO: 6093 - protein, 5 aa, Homo sapiens
MDTSR

SEQ ID NO: 6094 - protein, 5 aa, Homo sapiens
GGRWK

SEQ ID NO: 6095 - protein, 5 aa, Homo sapiens
RFLEP

SEQ ID NO: 6096 - protein, 5 aa, Homo sapiens
EEEED

SEQ ID NO: 6097 - protein, 5 aa, Homo sapiens
SQINP

SEQ ID NO: 6098 - protein, 5 aa, Homo sapiens
DTCRQ

SEQ ID NO: 6099 - protein, 5 aa, Homo sapiens
APYQP

SEQ ID NO: 6100 - protein, 5 aa, Homo sapiens
KFLTE

SEQ ID NO: 6101 - protein, 5 aa, Homo sapiens
ELGEL

SEQ ID NO: 6102 - protein, 5 aa, Homo sapiens
FTRRY

SEQ ID NO: 6103 - protein, 5 aa, Homo sapiens
EILLL

SEQ ID NO: 6104 - protein, 5 aa, Homo sapiens
ENHAP

SEQ ID NO: 6105 - protein, 5 aa, Homo sapiens
QLRRN

SEQ ID NO: 6106 - protein, 5 aa, Homo sapiens
QTPTA

SEQ ID NO: 6107 - protein, 5 aa, Homo sapiens
SLTTF

SEQ ID NO: 6108 - protein, 5 aa, Homo sapiens
AMESS

SEQ ID NO: 6109 - protein, 5 aa, Homo sapiens
RNSRT

SEQ ID NO: 6110 - protein, 5 aa, Homo sapiens
GSSGS

SEQ ID NO: 6111 - protein, 5 aa, Homo sapiens
YLCPV

SEQ ID NO: 6112 - protein, 5 aa, Homo sapiens
PKEDG

SEQ ID NO: 6113 - protein, 5 aa, Homo sapiens
DKEGA

SEQ ID NO: 6114 - protein, 5 aa, Homo sapiens
ISVGL

SEQ ID NO: 6115 - protein, 5 aa, Homo sapiens
PTEAR

SEQ ID NO: 6116 - protein, 5 aa, Homo sapiens
TCDSD

SEQ ID NO: 6117 - protein, 5 aa, Homo sapiens
HIMSS

SEQ ID NO: 6118 - protein, 5 aa, Homo sapiens
RRWEA

SEQ ID NO: 6119 - protein, 5 aa, Homo sapiens
GGNPG

SEQ ID NO: 6120 - protein, 5 aa, Homo sapiens
RRQDR

SEQ ID NO: 6121 - protein, 5 aa, Homo sapiens
SVARL

SEQ ID NO: 6122 - protein, 5 aa, Homo sapiens
LLGPR

SEQ ID NO: 6123 - protein, 5 aa, Homo sapiens
SVKKS

SEQ ID NO: 6124 - protein, 5 aa, Homo sapiens
PWEAS

SEQ ID NO: 6125 - protein, 5 aa, Homo sapiens
TIRSR

SEQ ID NO: 6126 - protein, 5 aa, Homo sapiens
AEALQ

SEQ ID NO: 6127 - protein, 5 aa, Homo sapiens
QLTRV

SEQ ID NO: 6128 - protein, 5 aa, Homo sapiens
AVVAF

SEQ ID NO: 6129 - protein, 5 aa, Homo sapiens
EGEAP

SEQ ID NO: 6130 - protein, 5 aa, Homo sapiens
LRKYH

SEQ ID NO: 6131 - protein, 5 aa, Homo sapiens
FLSGQ

SEQ ID NO: 6132 - protein, 5 aa, Homo sapiens
ALGGR

SEQ ID NO: 6133 - protein, 5 aa, Homo sapiens
LRFGP

SEQ ID NO: 6134 - protein, 5 aa, Homo sapiens
GLSHF

SEQ ID NO: 6135 - protein, 5 aa, Homo sapiens
FFRRL

SEQ ID NO: 6136 - protein, 5 aa, Homo sapiens
DYFSL

SEQ ID NO: 6137 - protein, 5 aa, Homo sapiens
GPLAN

SEQ ID NO: 6138 - protein, 5 aa, Homo sapiens
CCLLM

SEQ ID NO: 6139 - protein, 5 aa, Homo sapiens
FQIQK

SEQ ID NO: 6140 - protein, 5 aa, Homo sapiens
QERHF

SEQ ID NO: 6141 - protein, 5 aa, Homo sapiens
QGRPV

SEQ ID NO: 6142 - protein, 5 aa, Homo sapiens
SSADP

SEQ ID NO: 6143 - protein, 5 aa, Homo sapiens
VHRKL

SEQ ID NO: 6144 - protein, 5 aa, Homo sapiens
FDDDV

SEQ ID NO: 6145 - protein, 5 aa, Homo sapiens
LLPWA

SEQ ID NO: 6146 - protein, 5 aa, Homo sapiens
LLGSQ

SEQ ID NO: 6147 - protein, 5 aa, Homo sapiens
PFPSS

SEQ ID NO: 6148 - protein, 5 aa, Homo sapiens
IWGRM

SEQ ID NO: 6149 - protein, 5 aa, Homo sapiens
NLYEC

SEQ ID NO: 6150 - protein, 5 aa, Homo sapiens
LTVFG

SEQ ID NO: 6151 - protein, 5 aa, Homo sapiens
YMTYN

SEQ ID NO: 6152 - protein, 5 aa, Homo sapiens
PGHPY

SEQ ID NO: 6153 - protein, 5 aa, Homo sapiens
FALRR

SEQ ID NO: 6154 - protein, 5 aa, Homo sapiens
PNYHW

SEQ ID NO: 6155 - protein, 5 aa, Homo sapiens
ITASL

SEQ ID NO: 6156 - protein, 5 aa, Homo sapiens
EPSLL

SEQ ID NO: 6157 - protein, 5 aa, Homo sapiens
DEDGV

SEQ ID NO: 6158 - protein, 5 aa, Homo sapiens
KSTTV

SEQ ID NO: 6159 - protein, 5 aa, Homo sapiens
YETRC

SEQ ID NO: 6160 - protein, 5 aa, Homo sapiens
REGFL

SEQ ID NO: 6161 - protein, 5 aa, Homo sapiens
EDEED

SEQ ID NO: 6162 - protein, 5 aa, Homo sapiens
RVRLS

SEQ ID NO: 6163 - protein, 5 aa, Homo sapiens
PGSIM

SEQ ID NO: 6164 - protein, 5 aa, Homo sapiens
RIPSA

SEQ ID NO: 6165 - protein, 5 aa, Homo sapiens
AHKYH

SEQ ID NO: 6166 - protein, 5 aa, Homo sapiens
GGWCG

SEQ ID NO: 6167 - protein, 5 aa, Homo sapiens
SFPRN

SEQ ID NO: 6168 - protein, 5 aa, Homo sapiens
TTGIQ

SEQ ID NO: 6169 - protein, 5 aa, Homo sapiens
PYWGI

SEQ ID NO: 6170 - protein, 5 aa, Homo sapiens
SKLDS

SEQ ID NO: 6171 - protein, 5 aa, Homo sapiens
RALLK

SEQ ID NO: 6172 - protein, 5 aa, Homo sapiens
LESEV

SEQ ID NO: 6173 - protein, 5 aa, Homo sapiens
RLLGH

SEQ ID NO: 6174 - protein, 5 aa, Homo sapiens
EARPA

SEQ ID NO: 6175 - protein, 5 aa, Homo sapiens
QRFRH

SEQ ID NO: 6176 - protein, 5 aa, Homo sapiens
LQSKL

SEQ ID NO: 6177 - protein, 5 aa, Homo sapiens
HTLQS

SEQ ID NO: 6178 - protein, 5 aa, Homo sapiens
PSSGP

SEQ ID NO: 6179 - protein, 5 aa, Homo sapiens
GAVSS

SEQ ID NO: 6180 - protein, 5 aa, Homo sapiens
KMMSR

SEQ ID NO: 6181 - protein, 5 aa, Homo sapiens
SSNIS

SEQ ID NO: 6182 - protein, 5 aa, Homo sapiens
SLEMS

SEQ ID NO: 6183 - protein, 5 aa, Homo sapiens
LPELD

SEQ ID NO: 6184 - protein, 5 aa, Homo sapiens
GCRLR

SEQ ID NO: 6185 - protein, 5 aa, Homo sapiens
LLNSQ

SEQ ID NO: 6186 - protein, 5 aa, Homo sapiens
DMKEN

SEQ ID NO: 6187 - protein, 5 aa, Homo sapiens
KPYSI

SEQ ID NO: 6188 - protein, 5 aa, Homo sapiens
KTRKN

SEQ ID NO: 6189 - protein, 5 aa, Homo sapiens
FSLRV

SEQ ID NO: 6190 - protein, 5 aa, Homo sapiens
STLPV

SEQ ID NO: 6191 - protein, 5 aa, Homo sapiens
DVLPK

SEQ ID NO: 6192 - protein, 5 aa, Homo sapiens
PHAQS

SEQ ID NO: 6193 - protein, 5 aa, Homo sapiens
GQSGI

SEQ ID NO: 6194 - protein, 5 aa, Homo sapiens
QPPPV

SEQ ID NO: 6195 - protein, 5 aa, Homo sapiens
GQLQD

SEQ ID NO: 6196 - protein, 5 aa, Homo sapiens
LPMGD

SEQ ID NO: 6197 - protein, 5 aa, Homo sapiens
AETLY

SEQ ID NO: 6198 - protein, 5 aa, Homo sapiens
LDSVL

SEQ ID NO: 6199 - protein, 5 aa, Homo sapiens
AFHLN

SEQ ID NO: 6200 - protein, 5 aa, Homo sapiens
ATSDA

SEQ ID NO: 6201 - protein, 5 aa, Homo sapiens
SDPGS

SEQ ID NO: 6202 - protein, 5 aa, Homo sapiens
AALSS

SEQ ID NO: 6203 - protein, 5 aa, Homo sapiens
EGCIQ

SEQ ID NO: 6204 - protein, 5 aa, Homo sapiens
MVLNG

SEQ ID NO: 6205 - protein, 5 aa, Homo sapiens
WLRTD

SEQ ID NO: 6206 - protein, 5 aa, Homo sapiens
RICTE

SEQ ID NO: 6207 - protein, 5 aa, Homo sapiens
QSTAV

SEQ ID NO: 6208 - protein, 5 aa, Homo sapiens
PADSV

SEQ ID NO: 6209 - protein, 5 aa, Homo sapiens
SCKRC

SEQ ID NO: 6210 - protein, 5 aa, Homo sapiens
LHECL

SEQ ID NO: 6211 - protein, 5 aa, Homo sapiens
ELTTR

SEQ ID NO: 6212 - protein, 5 aa, Homo sapiens
PRPPE

SEQ ID NO: 6213 - protein, 5 aa, Homo sapiens
PRSPK

SEQ ID NO: 6214 - protein, 5 aa, Homo sapiens
VIASN

SEQ ID NO: 6215 - protein, 5 aa, Homo sapiens
EESQL

SEQ ID NO: 6216 - protein, 5 aa, Homo sapiens
MPWHL

SEQ ID NO: 6217 - protein, 5 aa, Homo sapiens
GQGRH

SEQ ID NO: 6218 - protein, 5 aa, Homo sapiens
RKRIF

SEQ ID NO: 6219 - protein, 5 aa, Homo sapiens
NVLIR

SEQ ID NO: 6220 - protein, 5 aa, Homo sapiens
RDGEC

SEQ ID NO: 6221 - protein, 5 aa, Homo sapiens
YLNHP

SEQ ID NO: 6222 - protein, 5 aa, Homo sapiens
LPQSC

SEQ ID NO: 6223 - protein, 5 aa, Homo sapiens
WRETI

SEQ ID NO: 6224 - protein, 5 aa, Homo sapiens
HKPNF

SEQ ID NO: 6225 - protein, 5 aa, Homo sapiens
VDTEW

SEQ ID NO: 6226 - protein, 5 aa, Homo sapiens
KKASR

SEQ ID NO: 6227 - protein, 5 aa, Homo sapiens
IQEGE

SEQ ID NO: 6228 - protein, 5 aa, Homo sapiens
SDSER

SEQ ID NO: 6229 - protein, 5 aa, Homo sapiens
NSVAI

SEQ ID NO: 6230 - protein, 5 aa, Homo sapiens
DHKPT

SEQ ID NO: 6231 - protein, 5 aa, Homo sapiens
LNKRR

SEQ ID NO: 6232 - protein, 5 aa, Homo sapiens
QMLEN

SEQ ID NO: 6233 - protein, 5 aa, Homo sapiens
PDSNT

SEQ ID NO: 6234 - protein, 5 aa, Homo sapiens
PCIQP

SEQ ID NO: 6235 - protein, 5 aa, Homo sapiens
THIET

SEQ ID NO: 6236 - protein, 5 aa, Homo sapiens
NFDQA

SEQ ID NO: 6237 - protein, 5 aa, Homo sapiens
ILGGP

SEQ ID NO: 6238 - protein, 5 aa, Homo sapiens
ARERL

SEQ ID NO: 6239 - protein, 5 aa, Homo sapiens
GFVKL

SEQ ID NO: 6240 - protein, 5 aa, Homo sapiens
SPPAP

SEQ ID NO: 6241 - protein, 5 aa, Homo sapiens
VADLI

SEQ ID NO: 6242 - protein, 5 aa, Homo sapiens
QRVRI

SEQ ID NO: 6243 - protein, 5 aa, Homo sapiens
HRWRD

SEQ ID NO: 6244 - protein, 5 aa, Homo sapiens
EAGEI

SEQ ID NO: 6245 - protein, 5 aa, Homo sapiens
LKELA

SEQ ID NO: 6246 - protein, 5 aa, Homo sapiens
EVPGL

SEQ ID NO: 6247 - protein, 5 aa, Homo sapiens
STFLG

SEQ ID NO: 6248 - protein, 5 aa, Homo sapiens
GGLTR

SEQ ID NO: 6249 - protein, 5 aa, Homo sapiens
TSTKS

SEQ ID NO: 6250 - protein, 5 aa, Homo sapiens
LTGQL

SEQ ID NO: 6251 - protein, 5 aa, Homo sapiens
TLTRP

SEQ ID NO: 6252 - protein, 5 aa, Homo sapiens
QTSKL

SEQ ID NO: 6253 - protein, 5 aa, Homo sapiens
GAPAR

SEQ ID NO: 6254 - protein, 5 aa, Homo sapiens
LERCP

SEQ ID NO: 6255 - protein, 5 aa, Homo sapiens
EGEAL

SEQ ID NO: 6256 - protein, 5 aa, Homo sapiens
DFGWG

SEQ ID NO: 6257 - protein, 5 aa, Homo sapiens
GLVRL

SEQ ID NO: 6258 - protein, 5 aa, Homo sapiens
DPDTQ

SEQ ID NO: 6259 - protein, 5 aa, Homo sapiens
RCSAA

SEQ ID NO: 6260 - protein, 5 aa, Homo sapiens
PGKSL

SEQ ID NO: 6261 - protein, 5 aa, Homo sapiens
QKLHL

SEQ ID NO: 6262 - protein, 5 aa, Homo sapiens
KVERN

SEQ ID NO: 6263 - protein, 5 aa, Homo sapiens
VSKSV

SEQ ID NO: 6264 - protein, 5 aa, Homo sapiens
VCNTI

SEQ ID NO: 6265 - protein, 5 aa, Homo sapiens
QFKSN

SEQ ID NO: 6266 - protein, 5 aa, Homo sapiens
HQSTY

SEQ ID NO: 6267 - protein, 5 aa, Homo sapiens
LHDGE

SEQ ID NO: 6268 - protein, 5 aa, Homo sapiens
FCALL

SEQ ID NO: 6269 - protein, 5 aa, Homo sapiens
REGAL

SEQ ID NO: 6270 - protein, 5 aa, Homo sapiens
GEAPS

SEQ ID NO: 6271 - protein, 5 aa, Homo sapiens
LAVVK

SEQ ID NO: 6272 - protein, 5 aa, Homo sapiens
LYLPL

SEQ ID NO: 6273 - protein, 5 aa, Homo sapiens
VAFMK

SEQ ID NO: 6274 - protein, 5 aa, Homo sapiens
YPFQL

SEQ ID NO: 6275 - protein, 5 aa, Homo sapiens
VVFLA

SEQ ID NO: 6276 - protein, 5 aa, Homo sapiens
TKASE

SEQ ID NO: 6277 - protein, 5 aa, Homo sapiens
DNHNL

SEQ ID NO: 6278 - protein, 5 aa, Homo sapiens
KGNGV

SEQ ID NO: 6279 - protein, 5 aa, Homo sapiens
NELKL

SEQ ID NO: 6280 - protein, 5 aa, Homo sapiens
RVGPS

SEQ ID NO: 6281 - protein, 5 aa, Homo sapiens
RMMSR

SEQ ID NO: 6282 - protein, 5 aa, Homo sapiens
CTDSS

SEQ ID NO: 6283 - protein, 5 aa, Homo sapiens
LWLCR

SEQ ID NO: 6284 - protein, 5 aa, Homo sapiens
PSFEK

SEQ ID NO: 6285 - protein, 5 aa, Homo sapiens
RSTPM

SEQ ID NO: 6286 - protein, 5 aa, Homo sapiens
HQQRC

SEQ ID NO: 6287 - protein, 5 aa, Homo sapiens
QARLN

SEQ ID NO: 6288 - protein, 5 aa, Homo sapiens
QFVKC

SEQ ID NO: 6289 - protein, 5 aa, Homo sapiens
DDVDP

SEQ ID NO: 6290 - protein, 5 aa, Homo sapiens
HHNMM

SEQ ID NO: 6291 - protein, 5 aa, Homo sapiens
VVLED

SEQ ID NO: 6292 - protein, 5 aa, Homo sapiens
LAVGF

SEQ ID NO: 6293 - protein, 5 aa, Homo sapiens
SKEAY

SEQ ID NO: 6294 - protein, 5 aa, Homo sapiens
KKRVY

SEQ ID NO: 6295 - protein, 5 aa, Homo sapiens
TRLQK

SEQ ID NO: 6296 - protein, 5 aa, Homo sapiens
QHKGT

SEQ ID NO: 6297 - protein, 5 aa, Homo sapiens
SFINV

SEQ ID NO: 6298 - protein, 5 aa, Homo sapiens
GRYSP

SEQ ID NO: 6299 - protein, 5 aa, Homo sapiens
PYSEV

SEQ ID NO: 6300 - protein, 5 aa, Homo sapiens
STGLD

SEQ ID NO: 6301 - protein, 5 aa, Homo sapiens
KGTSK

SEQ ID NO: 6302 - protein, 5 aa, Homo sapiens
KELLM

SEQ ID NO: 6303 - protein, 5 aa, Homo sapiens
QPPIE

SEQ ID NO: 6304 - protein, 5 aa, Homo sapiens
PISHT

SEQ ID NO: 6305 - protein, 5 aa, Homo sapiens
AKKKK

SEQ ID NO: 6306 - protein, 5 aa, Homo sapiens
YMEVM

SEQ ID NO: 6307 - protein, 5 aa, Homo sapiens
VLFIK

SEQ ID NO: 6308 - protein, 5 aa, Homo sapiens
KKIIS

SEQ ID NO: 6309 - protein, 5 aa, Homo sapiens
QHGLK

SEQ ID NO: 6310 - protein, 5 aa, Homo sapiens
SSTIK

SEQ ID NO: 6311 - protein, 5 aa, Homo sapiens
EETQL

SEQ ID NO: 6312 - protein, 5 aa, Homo sapiens
QKSKV

SEQ ID NO: 6313 - protein, 5 aa, Homo sapiens
VLECK

SEQ ID NO: 6314 - protein, 5 aa, Homo sapiens
NGNQT

SEQ ID NO: 6315 - protein, 5 aa, Homo sapiens
SQSYR

SEQ ID NO: 6316 - protein, 5 aa, Homo sapiens
ERVTS

SEQ ID NO: 6317 - protein, 5 aa, Homo sapiens
GAVSY

SEQ ID NO: 6318 - protein, 5 aa, Homo sapiens
VIFAY

SEQ ID NO: 6319 - protein, 5 aa, Homo sapiens
PAVAL

SEQ ID NO: 6320 - protein, 5 aa, Homo sapiens
SYFTS

SEQ ID NO: 6321 - protein, 5 aa, Homo sapiens
FPQLI

SEQ ID NO: 6322 - protein, 5 aa, Homo sapiens
TFEAH

SEQ ID NO: 6323 - protein, 5 aa, Homo sapiens
KRMEA

SEQ ID NO: 6324 - protein, 5 aa, Homo sapiens
VSFVR

SEQ ID NO: 6325 - protein, 5 aa, Homo sapiens
FQPNK

SEQ ID NO: 6326 - protein, 5 aa, Homo sapiens
RHTKL

SEQ ID NO: 6327 - protein, 5 aa, Homo sapiens
PVSIM

SEQ ID NO: 6328 - protein, 5 aa, Homo sapiens
KNKSR

SEQ ID NO: 6329 - protein, 5 aa, Homo sapiens
RYTEC

SEQ ID NO: 6330 - protein, 5 aa, Homo sapiens
VKASG

SEQ ID NO: 6331 - protein, 5 aa, Homo sapiens
KKPLG

SEQ ID NO: 6332 - protein, 5 aa, Homo sapiens
WLGST

SEQ ID NO: 6333 - protein, 5 aa, Homo sapiens
CTTGF

SEQ ID NO: 6334 - protein, 5 aa, Homo sapiens
CFSVL

SEQ ID NO: 6335 - protein, 5 aa, Homo sapiens
SSMDS

SEQ ID NO: 6336 - protein, 5 aa, Homo sapiens
EFFQV

SEQ ID NO: 6337 - protein, 5 aa, Homo sapiens
EKQDL

SEQ ID NO: 6338 - protein, 5 aa, Homo sapiens
TVLLC

SEQ ID NO: 6339 - protein, 5 aa, Homo sapiens
QVTCM

SEQ ID NO: 6340 - protein, 5 aa, Homo sapiens
SEESL

SEQ ID NO: 6341 - protein, 5 aa, Homo sapiens
VYAGF

SEQ ID NO: 6342 - protein, 5 aa, Homo sapiens
LVMYN

SEQ ID NO: 6343 - protein, 5 aa, Homo sapiens
RECEV

SEQ ID NO: 6344 - protein, 5 aa, Homo sapiens
RHRMS

SEQ ID NO: 6345 - protein, 5 aa, Homo sapiens
FEDRN

SEQ ID NO: 6346 - protein, 5 aa, Homo sapiens
FEGPN

SEQ ID NO: 6347 - protein, 5 aa, Homo sapiens
SKLLE

SEQ ID NO: 6348 - protein, 5 aa, Homo sapiens
LQSCK

SEQ ID NO: 6349 - protein, 5 aa, Homo sapiens
AIKAE

SEQ ID NO: 6350 - protein, 5 aa, Homo sapiens
RLKIR

SEQ ID NO: 6351 - protein, 5 aa, Homo sapiens
GSEED

SEQ ID NO: 6352 - protein, 5 aa, Homo sapiens
SDRFT

SEQ ID NO: 6353 - protein, 5 aa, Homo sapiens
AIFHD

SEQ ID NO: 6354 - protein, 5 aa, Homo sapiens
EHVFW

SEQ ID NO: 6355 - protein, 5 aa, Homo sapiens
ILNFD

SEQ ID NO: 6356 - protein, 5 aa, Homo sapiens
RQARN

SEQ ID NO: 6357 - protein, 5 aa, Homo sapiens
YMFGW

SEQ ID NO: 6358 - protein, 5 aa, Homo sapiens
SSASP

SEQ ID NO: 6359 - protein, 5 aa, Homo sapiens
EGVQL

SEQ ID NO: 6360 - protein, 5 aa, Homo sapiens
VEGGC

SEQ ID NO: 6361 - protein, 5 aa, Homo sapiens
STQTM

SEQ ID NO: 6362 - protein, 5 aa, Homo sapiens
HRKCF

SEQ ID NO: 6363 - protein, 5 aa, Homo sapiens
VDGMA

SEQ ID NO: 6364 - protein, 5 aa, Homo sapiens
ILVPE

SEQ ID NO: 6365 - protein, 5 aa, Homo sapiens
CDIQK

SEQ ID NO: 6366 - protein, 5 aa, Homo sapiens
HRSVL

SEQ ID NO: 6367 - protein, 5 aa, Homo sapiens
MNRIQ

SEQ ID NO: 6368 - protein, 5 aa, Homo sapiens
DGAHV

SEQ ID NO: 6369 - protein, 5 aa, Homo sapiens
LAGYQ

SEQ ID NO: 6370 - protein, 5 aa, Homo sapiens
KDESE

SEQ ID NO: 6371 - protein, 5 aa, Homo sapiens
GKKTL

SEQ ID NO: 6372 - protein, 5 aa, Homo sapiens
KQGID

SEQ ID NO: 6373 - protein, 5 aa, Homo sapiens
GLPRF

SEQ ID NO: 6374 - protein, 5 aa, Homo sapiens
YLILE

SEQ ID NO: 6375 - protein, 5 aa, Homo sapiens
FENVI

SEQ ID NO: 6376 - protein, 5 aa, Homo sapiens
RNFKK

SEQ ID NO: 6377 - protein, 5 aa, Homo sapiens
ECGCA

SEQ ID NO: 6378 - protein, 5 aa, Homo sapiens
QAEFS

SEQ ID NO: 6379 - protein, 5 aa, Homo sapiens
WEVMS

SEQ ID NO: 6380 - protein, 5 aa, Homo sapiens
VYFSF

SEQ ID NO: 6381 - protein, 5 aa, Homo sapiens
LNQWD

SEQ ID NO: 6382 - protein, 5 aa, Homo sapiens
PQTKL

SEQ ID NO: 6383 - protein, 5 aa, Homo sapiens
FKSVS

SEQ ID NO: 6384 - protein, 5 aa, Homo sapiens
AADIM

SEQ ID NO: 6385 - protein, 5 aa, Homo sapiens
LLQKK

SEQ ID NO: 6386 - protein, 5 aa, Homo sapiens
EDDEL

SEQ ID NO: 6387 - protein, 5 aa, Homo sapiens
NLNCI

SEQ ID NO: 6388 - protein, 5 aa, Homo sapiens
QQKKR

SEQ ID NO: 6389 - protein, 5 aa, Homo sapiens
GGPIS

SEQ ID NO: 6390 - protein, 5 aa, Homo sapiens
NKMPL

SEQ ID NO: 6391 - protein, 5 aa, Homo sapiens
MDKNK

SEQ ID NO: 6392 - protein, 5 aa, Homo sapiens
LVTSL

SEQ ID NO: 6393 - protein, 5 aa, Homo sapiens
KTKQK

SEQ ID NO: 6394 - protein, 5 aa, Homo sapiens
LVTTQ

SEQ ID NO: 6395 - protein, 5 aa, Homo sapiens
ECGCR

SEQ ID NO: 6396 - protein, 5 aa, Homo sapiens
PKTEA

SEQ ID NO: 6397 - protein, 5 aa, Homo sapiens
GEGTP

SEQ ID NO: 6398 - protein, 5 aa, Homo sapiens
SEVLM

SEQ ID NO: 6399 - protein, 5 aa, Homo sapiens
SGLGC

SEQ ID NO: 6400 - protein, 5 aa, Homo sapiens
MKDGN

SEQ ID NO: 6401 - protein, 5 aa, Homo sapiens
TATAP

SEQ ID NO: 6402 - protein, 5 aa, Homo sapiens
GYLYL

SEQ ID NO: 6403 - protein, 5 aa, Homo sapiens
TATAP

SEQ ID NO: 6404 - protein, 5 aa, Homo sapiens
LYYVH

SEQ ID NO: 6405 - protein, 5 aa, Homo sapiens
SRTDD

SEQ ID NO: 6406 - protein, 5 aa, Homo sapiens
ASAAP

SEQ ID NO: 6407 - protein, 5 aa, Homo sapiens
NYQPY

SEQ ID NO: 6408 - protein, 5 aa, Homo sapiens
STDKA

SEQ ID NO: 6409 - protein, 5 aa, Homo sapiens
IRYRE

SEQ ID NO: 6410 - protein, 5 aa, Homo sapiens
HSPKT

SEQ ID NO: 6411 - protein, 5 aa, Homo sapiens
VQIKT

SEQ ID NO: 6412 - protein, 5 aa, Homo sapiens
GKDYV

SEQ ID NO: 6413 - protein, 5 aa, Homo sapiens
TAYAG

SEQ ID NO: 6414 - protein, 5 aa, Homo sapiens
RPSLC

SEQ ID NO: 6415 - protein, 5 aa, Homo sapiens
SVMGT

SEQ ID NO: 6416 - protein, 5 aa, Homo sapiens
SCFLT

SEQ ID NO: 6417 - protein, 5 aa, Homo sapiens
LQKVL

SEQ ID NO: 6418 - protein, 5 aa, Homo sapiens
TKVTR

SEQ ID NO: 6419 - protein, 5 aa, Homo sapiens
PIELN

SEQ ID NO: 6420 - protein, 5 aa, Homo sapiens
LKTEL

SEQ ID NO: 6421 - protein, 5 aa, Homo sapiens
SVPPQ

SEQ ID NO: 6422 - protein, 5 aa, Homo sapiens
KETYY

SEQ ID NO: 6423 - protein, 5 aa, Homo sapiens
TEHTC

SEQ ID NO: 6424 - protein, 5 aa, Homo sapiens
KKTKL

SEQ ID NO: 6425 - protein, 5 aa, Homo sapiens
CLAQK

SEQ ID NO: 6426 - protein, 5 aa, Homo sapiens
MLCQV

SEQ ID NO: 6427 - protein, 5 aa, Homo sapiens
KVLLG

SEQ ID NO: 6428 - protein, 5 aa, Homo sapiens
STKEI

SEQ ID NO: 6429 - protein, 5 aa, Homo sapiens
APKGS

SEQ ID NO: 6430 - protein, 5 aa, Homo sapiens
LALDR

SEQ ID NO: 6431 - protein, 5 aa, Homo sapiens
SINSF

SEQ ID NO: 6432 - protein, 5 aa, Homo sapiens
ETSTV

SEQ ID NO: 6433 - protein, 5 aa, Homo sapiens
EGAEL

SEQ ID NO: 6434 - protein, 5 aa, Homo sapiens
SKKRN

SEQ ID NO: 6435 - protein, 5 aa, Homo sapiens
VSSNL

SEQ ID NO: 6436 - protein, 5 aa, Homo sapiens
TFSSR

SEQ ID NO: 6437 - protein, 5 aa, Homo sapiens
PRPWG

SEQ ID NO: 6438 - protein, 5 aa, Homo sapiens
SKDGS

SEQ ID NO: 6439 - protein, 5 aa, Homo sapiens
PAHSM

SEQ ID NO: 6440 - protein, 5 aa, Homo sapiens
KSCTV

SEQ ID NO: 6441 - protein, 5 aa, Homo sapiens
KALPQ

SEQ ID NO: 6442 - protein, 5 aa, Homo sapiens
GGHYH

SEQ ID NO: 6443 - protein, 5 aa, Homo sapiens
RRVQH

SEQ ID NO: 6444 - protein, 5 aa, Homo sapiens
SGAGS

SEQ ID NO: 6445 - protein, 5 aa, Homo sapiens
AETSL

SEQ ID NO: 6446 - protein, 5 aa, Homo sapiens
FRSQK

SEQ ID NO: 6447 - protein, 5 aa, Homo sapiens
FYTTP

SEQ ID NO: 6448 - protein, 5 aa, Homo sapiens
VNLSI

SEQ ID NO: 6449 - protein, 5 aa, Homo sapiens
CLYKN

SEQ ID NO: 6450 - protein, 5 aa, Homo sapiens
PAKQK

SEQ ID NO: 6451 - protein, 5 aa, Homo sapiens
CCHLT

SEQ ID NO: 6452 - protein, 5 aa, Homo sapiens
REPIN

SEQ ID NO: 6453 - protein, 5 aa, Homo sapiens
PPAVP

SEQ ID NO: 6454 - protein, 5 aa, Homo sapiens
ELSGH

SEQ ID NO: 6455 - protein, 5 aa, Homo sapiens
TTFAL

SEQ ID NO: 6456 - protein, 5 aa, Homo sapiens
LPTRW

SEQ ID NO: 6457 - protein, 5 aa, Homo sapiens
EEGSS

SEQ ID NO: 6458 - protein, 5 aa, Homo sapiens
SKKTV

SEQ ID NO: 6459 - protein, 5 aa, Homo sapiens
MTVEK

SEQ ID NO: 6460 - protein, 5 aa, Homo sapiens
DKTRQ

SEQ ID NO: 6461 - protein, 5 aa, Homo sapiens
DFEEL

SEQ ID NO: 6462 - protein, 5 aa, Homo sapiens
QKKKN

SEQ ID NO: 6463 - protein, 5 aa, Homo sapiens
HPAVP

SEQ ID NO: 6464 - protein, 5 aa, Homo sapiens
PDFFF

SEQ ID NO: 6465 - protein, 5 aa, Homo sapiens
IKPCK

SEQ ID NO: 6466 - protein, 5 aa, Homo sapiens
CKTLM

SEQ ID NO: 6467 - protein, 5 aa, Homo sapiens
FHKKQ

SEQ ID NO: 6468 - protein, 5 aa, Homo sapiens
ISKRI

SEQ ID NO: 6469 - protein, 5 aa, Homo sapiens
KTEEQ

SEQ ID NO: 6470 - protein, 5 aa, Homo sapiens
DLLPP

SEQ ID NO: 6471 - protein, 5 aa, Homo sapiens
MHYSE

SEQ ID NO: 6472 - protein, 5 aa, Homo sapiens
NDESF

SEQ ID NO: 6473 - protein, 5 aa, Homo sapiens
PMEQD

SEQ ID NO: 6474 - protein, 5 aa, Homo sapiens
STHVS

SEQ ID NO: 6475 - protein, 5 aa, Homo sapiens
MESLV

SEQ ID NO: 6476 - protein, 5 aa, Homo sapiens
SLVNE

SEQ ID NO: 6477 - protein, 5 aa, Homo sapiens
TDLSI

SEQ ID NO: 6478 - protein, 5 aa, Homo sapiens
PESSS

SEQ ID NO: 6479 - protein, 5 aa, Homo sapiens
PTLKV

SEQ ID NO: 6480 - protein, 5 aa, Homo sapiens
GPRNC

SEQ ID NO: 6481 - protein, 5 aa, Homo sapiens
FISRK

SEQ ID NO: 6482 - protein, 5 aa, Homo sapiens
FTNQI

SEQ ID NO: 6483 - protein, 5 aa, Homo sapiens
GPGDS

SEQ ID NO: 6484 - protein, 5 aa, Homo sapiens
PLPSK

SEQ ID NO: 6485 - protein, 5 aa, Homo sapiens
TDPKP

SEQ ID NO: 6486 - protein, 5 aa, Homo sapiens
RVINM

SEQ ID NO: 6487 - protein, 5 aa, Homo sapiens
NCIIS

SEQ ID NO: 6488 - protein, 5 aa, Homo sapiens
EVRVL

SEQ ID NO: 6489 - protein, 5 aa, Homo sapiens
AQEPC

SEQ ID NO: 6490 - protein, 5 aa, Homo sapiens
SGRWA

SEQ ID NO: 6491 - protein, 5 aa, Homo sapiens
INEEI

SEQ ID NO: 6492 - protein, 5 aa, Homo sapiens
TTEWE

SEQ ID NO: 6493 - protein, 5 aa, Homo sapiens
NTVSI

SEQ ID NO: 6494 - protein, 5 aa, Homo sapiens
GRHRR

SEQ ID NO: 6495 - protein, 5 aa, Homo sapiens
AQYVS

SEQ ID NO: 6496 - protein, 5 aa, Homo sapiens
GSPVA

SEQ ID NO: 6497 - protein, 5 aa, Homo sapiens
TNLLE

SEQ ID NO: 6498 - protein, 5 aa, Homo sapiens
CQLDD

SEQ ID NO: 6499 - protein, 5 aa, Homo sapiens
FNRKS

SEQ ID NO: 6500 - protein, 5 aa, Homo sapiens
VEQVS

SEQ ID NO: 6501 - protein, 5 aa, Homo sapiens
ARASP

SEQ ID NO: 6502 - protein, 5 aa, Homo sapiens
HVTVP

SEQ ID NO: 6503 - protein, 5 aa, Homo sapiens
APPVD

SEQ ID NO: 6504 - protein, 5 aa, Homo sapiens
ELVLD

SEQ ID NO: 6505 - protein, 5 aa, Homo sapiens
NKKLD

SEQ ID NO: 6506 - protein, 5 aa, Homo sapiens
YYELV

SEQ ID NO: 6507 - protein, 5 aa, Homo sapiens
LADLG

SEQ ID NO: 6508 - protein, 5 aa, Homo sapiens
AGDGT

SEQ ID NO: 6509 - protein, 5 aa, Homo sapiens
ASSQR

SEQ ID NO: 6510 - protein, 5 aa, Homo sapiens
DTIEL

SEQ ID NO: 6511 - protein, 5 aa, Homo sapiens
SLFSD

SEQ ID NO: 6512 - protein, 5 aa, Homo sapiens
SMELS

SEQ ID NO: 6513 - protein, 5 aa, Homo sapiens
KNKQC

SEQ ID NO: 6514 - protein, 5 aa, Homo sapiens
SSNAL

SEQ ID NO: 6515 - protein, 5 aa, Homo sapiens
NKSKN

SEQ ID NO: 6516 - protein, 5 aa, Homo sapiens
KGSTN

SEQ ID NO: 6517 - protein, 5 aa, Homo sapiens
DESAD

SEQ ID NO: 6518 - protein, 5 aa, Homo sapiens
KLLES

SEQ ID NO: 6519 - protein, 5 aa, Homo sapiens
SDKNN

SEQ ID NO: 6520 - protein, 5 aa, Homo sapiens
LTSPL

SEQ ID NO: 6521 - protein, 5 aa, Homo sapiens
LKHTS

SEQ ID NO: 6522 - protein, 5 aa, Homo sapiens
KKPLT

SEQ ID NO: 6523 - protein, 5 aa, Homo sapiens
QPGII

SEQ ID NO: 6524 - protein, 5 aa, Homo sapiens
LGAYV

SEQ ID NO: 6525 - protein, 5 aa, Homo sapiens
CCHVI

SEQ ID NO: 6526 - protein, 5 aa, Homo sapiens
LHSGD

SEQ ID NO: 6527 - protein, 5 aa, Homo sapiens
ALGDK

SEQ ID NO: 6528 - protein, 5 aa, Homo sapiens
SEDDF

SEQ ID NO: 6529 - protein, 5 aa, Homo sapiens
RPDGP

SEQ ID NO: 6530 - protein, 5 aa, Homo sapiens
DSVGK

SEQ ID NO: 6531 - protein, 5 aa, Homo sapiens
KIRSL

SEQ ID NO: 6532 - protein, 5 aa, Homo sapiens
PEATR

SEQ ID NO: 6533 - protein, 5 aa, Homo sapiens
NHIRD

SEQ ID NO: 6534 - protein, 5 aa, Homo sapiens
EDENE

SEQ ID NO: 6535 - protein, 5 aa, Homo sapiens
VLITK

SEQ ID NO: 6536 - protein, 5 aa, Homo sapiens
ESEEE

SEQ ID NO: 6537 - protein, 5 aa, Homo sapiens
YQYVV

SEQ ID NO: 6538 - protein, 5 aa, Homo sapiens
MEPAE

SEQ ID NO: 6539 - protein, 5 aa, Homo sapiens
QFGIV

SEQ ID NO: 6540 - protein, 5 aa, Homo sapiens
YEPED

SEQ ID NO: 6541 - protein, 5 aa, Homo sapiens
GSDFL

SEQ ID NO: 6542 - protein, 5 aa, Homo sapiens
LSAGF

SEQ ID NO: 6543 - protein, 5 aa, Homo sapiens
VKTAI

SEQ ID NO: 6544 - protein, 5 aa, Homo sapiens
WRIQS

SEQ ID NO: 6545 - protein, 5 aa, Homo sapiens
FSLQL

SEQ ID NO: 6546 - protein, 5 aa, Homo sapiens
IQSYY

SEQ ID NO: 6547 - protein, 5 aa, Homo sapiens
AKGIE

SEQ ID NO: 6548 - protein, 5 aa, Homo sapiens
NGTVD

SEQ ID NO: 6549 - protein, 5 aa, Homo sapiens
EGKTS

SEQ ID NO: 6550 - protein, 5 aa, Homo sapiens
PREFA

SEQ ID NO: 6551 - protein, 5 aa, Homo sapiens
PRADY

SEQ ID NO: 6552 - protein, 5 aa, Homo sapiens
EVSDS

SEQ ID NO: 6553 - protein, 5 aa, Homo sapiens
IAPKK

SEQ ID NO: 6554 - protein, 5 aa, Homo sapiens
TQPAE

SEQ ID NO: 6555 - protein, 5 aa, Homo sapiens
KKLAF

SEQ ID NO: 6556 - protein, 5 aa, Homo sapiens
VRSVN

SEQ ID NO: 6557 - protein, 5 aa, Homo sapiens
PPSGV

SEQ ID NO: 6558 - protein, 5 aa, Homo sapiens
PELQL

SEQ ID NO: 6559 - protein, 5 aa, Homo sapiens
SRKDT

SEQ ID NO: 6560 - protein, 5 aa, Homo sapiens
ILDAL

SEQ ID NO: 6561 - protein, 5 aa, Homo sapiens
HQQLL

SEQ ID NO: 6562 - protein, 5 aa, Homo sapiens
DDPGP

SEQ ID NO: 6563 - protein, 5 aa, Homo sapiens
TFHLN

SEQ ID NO: 6564 - protein, 5 aa, Homo sapiens
QVAPA

SEQ ID NO: 6565 - protein, 5 aa, Homo sapiens
LSQNC

SEQ ID NO: 6566 - protein, 5 aa, Homo sapiens
TKLGL

SEQ ID NO: 6567 - protein, 5 aa, Homo sapiens
PQVER

SEQ ID NO: 6568 - protein, 5 aa, Homo sapiens
KAKRQ

SEQ ID NO: 6569 - protein, 5 aa, Homo sapiens
LITKA

SEQ ID NO: 6570 - protein, 5 aa, Homo sapiens
TDKMT

SEQ ID NO: 6571 - protein, 5 aa, Homo sapiens
NLENV

SEQ ID NO: 6572 - protein, 5 aa, Homo sapiens
AVAPL

SEQ ID NO: 6573 - protein, 5 aa, Homo sapiens
RHNEL

SEQ ID NO: 6574 - protein, 5 aa, Homo sapiens
TPGAW

SEQ ID NO: 6575 - protein, 5 aa, Homo sapiens
LNLKA

SEQ ID NO: 6576 - protein, 5 aa, Homo sapiens
VQERN

SEQ ID NO: 6577 - protein, 5 aa, Homo sapiens
GHFSL

SEQ ID NO: 6578 - protein, 5 aa, Homo sapiens
VLEAT

SEQ ID NO: 6579 - protein, 5 aa, Homo sapiens
LPPAL

SEQ ID NO: 6580 - protein, 5 aa, Homo sapiens
VYCKI

SEQ ID NO: 6581 - protein, 5 aa, Homo sapiens
KAGLK

SEQ ID NO: 6582 - protein, 5 aa, Homo sapiens
VKKAK

SEQ ID NO: 6583 - protein, 5 aa, Homo sapiens
GPLGV

SEQ ID NO: 6584 - protein, 5 aa, Homo sapiens
NILFV

SEQ ID NO: 6585 - protein, 5 aa, Homo sapiens
FMSQF

SEQ ID NO: 6586 - protein, 5 aa, Homo sapiens
TVVKI

SEQ ID NO: 6587 - protein, 5 aa, Homo sapiens
SFIFK

SEQ ID NO: 6588 - protein, 5 aa, Homo sapiens
QQKTV

SEQ ID NO: 6589 - protein, 5 aa, Homo sapiens
GKTKN

SEQ ID NO: 6590 - protein, 5 aa, Homo sapiens
TLEHH

SEQ ID NO: 6591 - protein, 5 aa, Homo sapiens
GGWSL

SEQ ID NO: 6592 - protein, 5 aa, Homo sapiens
HNKQD

SEQ ID NO: 6593 - protein, 5 aa, Homo sapiens
PRTES

SEQ ID NO: 6594 - protein, 5 aa, Homo sapiens
TRSPS

SEQ ID NO: 6595 - protein, 5 aa, Homo sapiens
YSLNT

SEQ ID NO: 6596 - protein, 5 aa, Homo sapiens
KVTDL

SEQ ID NO: 6597 - protein, 5 aa, Homo sapiens
PKAAL

SEQ ID NO: 6598 - protein, 5 aa, Homo sapiens
DDDGF

SEQ ID NO: 6599 - protein, 5 aa, Homo sapiens
FSSFW

SEQ ID NO: 6600 - protein, 5 aa, Homo sapiens
THLGS

SEQ ID NO: 6601 - protein, 5 aa, Homo sapiens
EMEVD

SEQ ID NO: 6602 - protein, 5 aa, Homo sapiens
GRIQE

SEQ ID NO: 6603 - protein, 5 aa, Homo sapiens
REEAS

SEQ ID NO: 6604 - protein, 5 aa, Homo sapiens
TPLTY

SEQ ID NO: 6605 - protein, 5 aa, Homo sapiens
PPRPT

SEQ ID NO: 6606 - protein, 5 aa, Homo sapiens
EVTGK

SEQ ID NO: 6607 - protein, 5 aa, Homo sapiens
TTSSL

SEQ ID NO: 6608 - protein, 5 aa, Homo sapiens
TLEST

SEQ ID NO: 6609 - protein, 5 aa, Homo sapiens
QRATP

SEQ ID NO: 6610 - protein, 5 aa, Homo sapiens
KRLKT

SEQ ID NO: 6611 - protein, 5 aa, Homo sapiens
ESSDH

SEQ ID NO: 6612 - protein, 5 aa, Homo sapiens
PTIDD

SEQ ID NO: 6613 - protein, 5 aa, Homo sapiens
VYFLP

SEQ ID NO: 6614 - protein, 5 aa, Homo sapiens
SVTKL

SEQ ID NO: 6615 - protein, 5 aa, Homo sapiens
LQKVR

SEQ ID NO: 6616 - protein, 5 aa, Homo sapiens
DEDEE

SEQ ID NO: 6617 - protein, 5 aa, Homo sapiens
DSGVH

SEQ ID NO: 6618 - protein, 5 aa, Homo sapiens
PCNNQ

SEQ ID NO: 6619 - protein, 5 aa, Homo sapiens
VKFSL

SEQ ID NO: 6620 - protein, 5 aa, Homo sapiens
IPVND

SEQ ID NO: 6621 - protein, 5 aa, Homo sapiens
CGEDD

SEQ ID NO: 6622 - protein, 5 aa, Homo sapiens
EQFNM

SEQ ID NO: 6623 - protein, 5 aa, Homo sapiens
ASGID

SEQ ID NO: 6624 - protein, 5 aa, Homo sapiens
PNHYL

SEQ ID NO: 6625 - protein, 5 aa, Homo sapiens
QAKTQ

SEQ ID NO: 6626 - protein, 5 aa, Homo sapiens
FLQYR

SEQ ID NO: 6627 - protein, 5 aa, Homo sapiens
AFSKI

SEQ ID NO: 6628 - protein, 5 aa, Homo sapiens
LANEI

SEQ ID NO: 6629 - protein, 5 aa, Homo sapiens
FINTS

SEQ ID NO: 6630 - protein, 5 aa, Homo sapiens
WLEEQ

SEQ ID NO: 6631 - protein, 5 aa, Homo sapiens
SQSSL

SEQ ID NO: 6632 - protein, 5 aa, Homo sapiens
TSYIV

SEQ ID NO: 6633 - protein, 5 aa, Homo sapiens
FFLDD

SEQ ID NO: 6634 - protein, 5 aa, Homo sapiens
QKRRM

SEQ ID NO: 6635 - protein, 5 aa, Homo sapiens
KSVDS

SEQ ID NO: 6636 - protein, 5 aa, Homo sapiens
TELSS

SEQ ID NO: 6637 - protein, 5 aa, Homo sapiens
VRYVD

SEQ ID NO: 6638 - protein, 5 aa, Homo sapiens
CTEEE

SEQ ID NO: 6639 - protein, 5 aa, Homo sapiens
YLTVA

SEQ ID NO: 6640 - protein, 5 aa, Homo sapiens
KNKDN

SEQ ID NO: 6641 - protein, 5 aa, Homo sapiens
KSHNQ

SEQ ID NO: 6642 - protein, 5 aa, Homo sapiens
GALCL

SEQ ID NO: 6643 - protein, 5 aa, Homo sapiens
IFNDV

SEQ ID NO: 6644 - protein, 5 aa, Homo sapiens
SVACS

SEQ ID NO: 6645 - protein, 5 aa, Homo sapiens
ADTHL

SEQ ID NO: 6646 - protein, 5 aa, Homo sapiens
LQNNI

SEQ ID NO: 6647 - protein, 5 aa, Homo sapiens
LRKAL

SEQ ID NO: 6648 - protein, 5 aa, Homo sapiens
VEDHA

SEQ ID NO: 6649 - protein, 5 aa, Homo sapiens
AYLTK

SEQ ID NO: 6650 - protein, 5 aa, Homo sapiens
VHIST

SEQ ID NO: 6651 - protein, 5 aa, Homo sapiens
WKKRT

SEQ ID NO: 6652 - protein, 5 aa, Homo sapiens
LNKYM

SEQ ID NO: 6653 - protein, 5 aa, Homo sapiens
QQSTG

SEQ ID NO: 6654 - protein, 5 aa, Homo sapiens
ERPRS

SEQ ID NO: 6655 - protein, 5 aa, Homo sapiens
VKTSY

SEQ ID NO: 6656 - protein, 5 aa, Homo sapiens
LYLAV

SEQ ID NO: 6657 - protein, 5 aa, Homo sapiens
CREDE

SEQ ID NO: 6658 - protein, 5 aa, Homo sapiens
RVSTK

SEQ ID NO: 6659 - protein, 5 aa, Homo sapiens
LSHLV

SEQ ID NO: 6660 - protein, 5 aa, Homo sapiens
KSGPC

SEQ ID NO: 6661 - protein, 5 aa, Homo sapiens
RRSTK

SEQ ID NO: 6662 - protein, 5 aa, Homo sapiens
EMKKT

SEQ ID NO: 6663 - protein, 5 aa, Homo sapiens
KKEDL

SEQ ID NO: 6664 - protein, 5 aa, Homo sapiens
FLQTK

SEQ ID NO: 6665 - protein, 5 aa, Homo sapiens
LFLLA

SEQ ID NO: 6666 - protein, 5 aa, Homo sapiens
ADATG

SEQ ID NO: 6667 - protein, 5 aa, Homo sapiens
CKIEL

SEQ ID NO: 6668 - protein, 5 aa, Homo sapiens
WSAVT

SEQ ID NO: 6669 - protein, 5 aa, Homo sapiens
YSLPR

SEQ ID NO: 6670 - protein, 5 aa, Homo sapiens
LLKCL

SEQ ID NO: 6671 - protein, 5 aa, Homo sapiens
AVLKR

SEQ ID NO: 6672 - protein, 5 aa, Homo sapiens
QNIKE

SEQ ID NO: 6673 - protein, 5 aa, Homo sapiens
KKQGQ

SEQ ID NO: 6674 - protein, 5 aa, Homo sapiens
KKIES

SEQ ID NO: 6675 - protein, 5 aa, Homo sapiens
DCCAS

SEQ ID NO: 6676 - protein, 5 aa, Homo sapiens
KNSVH

SEQ ID NO: 6677 - protein, 5 aa, Homo sapiens
NIVYL

SEQ ID NO: 6678 - protein, 5 aa, Homo sapiens
AVLLV

SEQ ID NO: 6679 - protein, 5 aa, Homo sapiens
TSIPL

SEQ ID NO: 6680 - protein, 5 aa, Homo sapiens
RSGLT

SEQ ID NO: 6681 - protein, 5 aa, Homo sapiens
AILEK

SEQ ID NO: 6682 - protein, 5 aa, Homo sapiens
ETLLA

SEQ ID NO: 6683 - protein, 5 aa, Homo sapiens
SNEAF

SEQ ID NO: 6684 - protein, 5 aa, Homo sapiens
HFHPS

SEQ ID NO: 6685 - protein, 5 aa, Homo sapiens
QRTVL

SEQ ID NO: 6686 - protein, 5 aa, Homo sapiens
QVSAV

SEQ ID NO: 6687 - protein, 5 aa, Homo sapiens
LPDLL

SEQ ID NO: 6688 - protein, 5 aa, Homo sapiens
HEDVL

SEQ ID NO: 6689 - protein, 5 aa, Homo sapiens
YSISM

SEQ ID NO: 6690 - protein, 5 aa, Homo sapiens
SLAIF

SEQ ID NO: 6691 - protein, 5 aa, Homo sapiens
EPVQE

SEQ ID NO: 6692 - protein, 5 aa, Homo sapiens
KCTCR

SEQ ID NO: 6693 - protein, 5 aa, Homo sapiens
QVLSV

SEQ ID NO: 6694 - protein, 5 aa, Homo sapiens
KSRSR

SEQ ID NO: 6695 - protein, 5 aa, Homo sapiens
VTSLV

SEQ ID NO: 6696 - protein, 5 aa, Homo sapiens
WRKSL

SEQ ID NO: 6697 - protein, 5 aa, Homo sapiens
SPPSM

SEQ ID NO: 6698 - protein, 5 aa, Homo sapiens
ANFSK

SEQ ID NO: 6699 - protein, 5 aa, Homo sapiens
PTSKV

SEQ ID NO: 6700 - protein, 5 aa, Homo sapiens
QHPLT

SEQ ID NO: 6701 - protein, 5 aa, Homo sapiens
SETRF

SEQ ID NO: 6702 - protein, 5 aa, Homo sapiens
CVEIP

SEQ ID NO: 6703 - protein, 5 aa, Homo sapiens
RAKGR

SEQ ID NO: 6704 - protein, 5 aa, Homo sapiens
ETIDY

SEQ ID NO: 6705 - protein, 5 aa, Homo sapiens
KAQSK

SEQ ID NO: 6706 - protein, 5 aa, Homo sapiens
ARKKV

SEQ ID NO: 6707 - protein, 5 aa, Homo sapiens
RRKNR

SEQ ID NO: 6708 - protein, 5 aa, Homo sapiens
DSSKW

SEQ ID NO: 6709 - protein, 5 aa, Homo sapiens
SVDVA

SEQ ID NO: 6710 - protein, 5 aa, Homo sapiens
SPRRY

SEQ ID NO: 6711 - protein, 5 aa, Homo sapiens
DDRHK

SEQ ID NO: 6712 - protein, 5 aa, Homo sapiens
KFNRN

SEQ ID NO: 6713 - protein, 5 aa, Homo sapiens
GKQLE

SEQ ID NO: 6714 - protein, 5 aa, Homo sapiens
ESEEL

SEQ ID NO: 6715 - protein, 5 aa, Homo sapiens
MSALQ

SEQ ID NO: 6716 - protein, 5 aa, Homo sapiens
AVFHN

SEQ ID NO: 6717 - protein, 5 aa, Homo sapiens
ILLLS

SEQ ID NO: 6718 - protein, 5 aa, Homo sapiens
PYCVI

SEQ ID NO: 6719 - protein, 5 aa, Homo sapiens
QQKSL

SEQ ID NO: 6720 - protein, 5 aa, Homo sapiens
SFLGQ

SEQ ID NO: 6721 - protein, 5 aa, Homo sapiens
GSEVP

SEQ ID NO: 6722 - protein, 5 aa, Homo sapiens
GSDSE

SEQ ID NO: 6723 - protein, 5 aa, Homo sapiens
VMPLW

SEQ ID NO: 6724 - protein, 5 aa, Homo sapiens
LCPQR

SEQ ID NO: 6725 - protein, 5 aa, Homo sapiens
EHAQT

SEQ ID NO: 6726 - protein, 5 aa, Homo sapiens
GAGSM

SEQ ID NO: 6727 - protein, 5 aa, Homo sapiens
GRDTR

SEQ ID NO: 6728 - protein, 5 aa, Homo sapiens
KEEKQ

SEQ ID NO: 6729 - protein, 5 aa, Homo sapiens
KKKKK

SEQ ID NO: 6730 - protein, 5 aa, Homo sapiens
ILAGL

SEQ ID NO: 6731 - protein, 5 aa, Homo sapiens
APSRF

SEQ ID NO: 6732 - protein, 5 aa, Homo sapiens
ICSQL

SEQ ID NO: 6733 - protein, 5 aa, Homo sapiens
KSRGM

SEQ ID NO: 6734 - protein, 5 aa, Homo sapiens
TLVLH

SEQ ID NO: 6735 - protein, 5 aa, Homo sapiens
YEKVE

SEQ ID NO: 6736 - protein, 5 aa, Homo sapiens
AVKSS

SEQ ID NO: 6737 - protein, 5 aa, Homo sapiens
AAWAT

SEQ ID NO: 6738 - protein, 5 aa, Homo sapiens
IPGKW

SEQ ID NO: 6739 - protein, 5 aa, Homo sapiens
DKSKH

SEQ ID NO: 6740 - protein, 5 aa, Homo sapiens
QGKAK

SEQ ID NO: 6741 - protein, 5 aa, Homo sapiens
REEKY

SEQ ID NO: 6742 - protein, 5 aa, Homo sapiens
GATFA

SEQ ID NO: 6743 - protein, 5 aa, Homo sapiens
DGEKD

SEQ ID NO: 6744 - protein, 5 aa, Homo sapiens
GRVEE

SEQ ID NO: 6745 - protein, 5 aa, Homo sapiens
KSIEA

SEQ ID NO: 6746 - protein, 5 aa, Homo sapiens
NYPDV

SEQ ID NO: 6747 - protein, 5 aa, Homo sapiens
AGKEA

SEQ ID NO: 6748 - protein, 5 aa, Homo sapiens
VNDNV

SEQ ID NO: 6749 - protein, 5 aa, Homo sapiens
PGKHI

SEQ ID NO: 6750 - protein, 5 aa, Homo sapiens
RFHII

SEQ ID NO: 6751 - protein, 5 aa, Homo sapiens
EDPCD

SEQ ID NO: 6752 - protein, 5 aa, Homo sapiens
LAMRN

SEQ ID NO: 6753 - protein, 5 aa, Homo sapiens
KISCL

SEQ ID NO: 6754 - protein, 5 aa, Homo sapiens
SFIFI

SEQ ID NO: 6755 - protein, 5 aa, Homo sapiens
KSDSE

SEQ ID NO: 6756 - protein, 5 aa, Homo sapiens
DDFWF

SEQ ID NO: 6757 - protein, 5 aa, Homo sapiens
VCTMV

SEQ ID NO: 6758 - protein, 5 aa, Homo sapiens
IRTLP

SEQ ID NO: 6759 - protein, 5 aa, Homo sapiens
ASAEH

SEQ ID NO: 6760 - protein, 5 aa, Homo sapiens
LYDFL

SEQ ID NO: 6761 - protein, 5 aa, Homo sapiens
CTRVD

SEQ ID NO: 6762 - protein, 5 aa, Homo sapiens
RFCCL

SEQ ID NO: 6763 - protein, 5 aa, Homo sapiens
GDGIA

SEQ ID NO: 6764 - protein, 5 aa, Homo sapiens
AKCCK

SEQ ID NO: 6765 - protein, 5 aa, Homo sapiens
VPATQ

SEQ ID NO: 6766 - protein, 5 aa, Homo sapiens
GEPVK

SEQ ID NO: 6767 - protein, 5 aa, Homo sapiens
RPLDF

SEQ ID NO: 6768 - protein, 5 aa, Homo sapiens
LAVQS

SEQ ID NO: 6769 - protein, 5 aa, Homo sapiens
QQVLA

SEQ ID NO: 6770 - protein, 5 aa, Homo sapiens
QWSPG

SEQ ID NO: 6771 - protein, 5 aa, Homo sapiens
DTNSP

SEQ ID NO: 6772 - protein, 5 aa, Homo sapiens
HQHKS

SEQ ID NO: 6773 - protein, 5 aa, Homo sapiens
SSPSQ

SEQ ID NO: 6774 - protein, 5 aa, Homo sapiens
LGAPP

SEQ ID NO: 6775 - protein, 5 aa, Homo sapiens
DFCPP

SEQ ID NO: 6776 - protein, 5 aa, Homo sapiens
DVSEE

SEQ ID NO: 6777 - protein, 5 aa, Homo sapiens
GPEGG

SEQ ID NO: 6778 - protein, 5 aa, Homo sapiens
AMYRP

SEQ ID NO: 6779 - protein, 5 aa, Homo sapiens
WMLHS

SEQ ID NO: 6780 - protein, 5 aa, Homo sapiens
QGARP

SEQ ID NO: 6781 - protein, 5 aa, Homo sapiens
DLDIF

SEQ ID NO: 6782 - protein, 5 aa, Homo sapiens
GIKFQ

SEQ ID NO: 6783 - protein, 5 aa, Homo sapiens
ILVPL

SEQ ID NO: 6784 - protein, 5 aa, Homo sapiens
FQSVK

SEQ ID NO: 6785 - protein, 5 aa, Homo sapiens
PRQDF

SEQ ID NO: 6786 - protein, 5 aa, Homo sapiens
KNCVN

SEQ ID NO: 6787 - protein, 5 aa, Homo sapiens
REKRK

SEQ ID NO: 6788 - protein, 5 aa, Homo sapiens
VAVVK

SEQ ID NO: 6789 - protein, 5 aa, Homo sapiens
SADKS

SEQ ID NO: 6790 - protein, 5 aa, Homo sapiens
RSFTR

SEQ ID NO: 6791 - protein, 5 aa, Homo sapiens
EYNSL

SEQ ID NO: 6792 - protein, 5 aa, Homo sapiens
DLSVL

SEQ ID NO: 6793 - protein, 5 aa, Homo sapiens
RDTRS

SEQ ID NO: 6794 - protein, 5 aa, Homo sapiens
PISEP

SEQ ID NO: 6795 - protein, 5 aa, Homo sapiens
FTWAS

SEQ ID NO: 6796 - protein, 5 aa, Homo sapiens
LETKS

SEQ ID NO: 6797 - protein, 5 aa, Homo sapiens
RAGAS

SEQ ID NO: 6798 - protein, 5 aa, Homo sapiens
KKEEC

SEQ ID NO: 6799 - protein, 5 aa, Homo sapiens
TGSAQ

SEQ ID NO: 6800 - protein, 5 aa, Homo sapiens
ASDSG

SEQ ID NO: 6801 - protein, 5 aa, Homo sapiens
NLKNK

SEQ ID NO: 6802 - protein, 5 aa, Homo sapiens
NPCCP

SEQ ID NO: 6803 - protein, 5 aa, Homo sapiens
TAKDK

SEQ ID NO: 6804 - protein, 5 aa, Homo sapiens
LKKCP

SEQ ID NO: 6805 - protein, 5 aa, Homo sapiens
VYSGL

SEQ ID NO: 6806 - protein, 5 aa, Homo sapiens
AAGRQ

SEQ ID NO: 6807 - protein, 5 aa, Homo sapiens
SQKNS

SEQ ID NO: 6808 - protein, 5 aa, Homo sapiens
AETSS

SEQ ID NO: 6809 - protein, 5 aa, Homo sapiens
DGSRL

SEQ ID NO: 6810 - protein, 5 aa, Homo sapiens
RDLKT

SEQ ID NO: 6811 - protein, 5 aa, Homo sapiens
KFSKF

SEQ ID NO: 6812 - protein, 5 aa, Homo sapiens
YNMKC

SEQ ID NO: 6813 - protein, 5 aa, Homo sapiens
FMLTH

SEQ ID NO: 6814 - protein, 5 aa, Homo sapiens
WGPGV

SEQ ID NO: 6815 - protein, 5 aa, Homo sapiens
SKSDD

SEQ ID NO: 6816 - protein, 5 aa, Homo sapiens
IVTYI

SEQ ID NO: 6817 - protein, 5 aa, Homo sapiens
PRLRK

SEQ ID NO: 6818 - protein, 5 aa, Homo sapiens
GKCRL

SEQ ID NO: 6819 - protein, 5 aa, Homo sapiens
LWGVG

SEQ ID NO: 6820 - protein, 5 aa, Homo sapiens
SRKNP

SEQ ID NO: 6821 - protein, 5 aa, Homo sapiens
LASAV

SEQ ID NO: 6822 - protein, 5 aa, Homo sapiens
KELLG

SEQ ID NO: 6823 - protein, 5 aa, Homo sapiens
TFFFR

SEQ ID NO: 6824 - protein, 5 aa, Homo sapiens
RKDYV

SEQ ID NO: 6825 - protein, 5 aa, Homo sapiens
DPVRS

SEQ ID NO: 6826 - protein, 5 aa, Homo sapiens
VSESL

SEQ ID NO: 6827 - protein, 5 aa, Homo sapiens
ALEHF

SEQ ID NO: 6828 - protein, 5 aa, Homo sapiens
ERWTV

SEQ ID NO: 6829 - protein, 5 aa, Homo sapiens
HKEQI

SEQ ID NO: 6830 - protein, 5 aa, Homo sapiens
RNSVE

SEQ ID NO: 6831 - protein, 5 aa, Homo sapiens
HQTQV

SEQ ID NO: 6832 - protein, 5 aa, Homo sapiens
SSCKV

SEQ ID NO: 6833 - protein, 5 aa, Homo sapiens
QNRHI

SEQ ID NO: 6834 - protein, 5 aa, Homo sapiens
GFGLE

SEQ ID NO: 6835 - protein, 5 aa, Homo sapiens
YVHSV

SEQ ID NO: 6836 - protein, 5 aa, Homo sapiens
FSEDI

SEQ ID NO: 6837 - protein, 5 aa, Homo sapiens
NRRSV

SEQ ID NO: 6838 - protein, 5 aa, Homo sapiens
SATFP

SEQ ID NO: 6839 - protein, 5 aa, Homo sapiens
RLELI

SEQ ID NO: 6840 - protein, 5 aa, Homo sapiens
RLTSS

SEQ ID NO: 6841 - protein, 5 aa, Homo sapiens
TPVVS

SEQ ID NO: 6842 - protein, 5 aa, Homo sapiens
MTSHS

SEQ ID NO: 6843 - protein, 5 aa, Homo sapiens
FEIVQ

SEQ ID NO: 6844 - protein, 5 aa, Homo sapiens
GGLFS

SEQ ID NO: 6845 - protein, 5 aa, Homo sapiens
EGKPL

SEQ ID NO: 6846 - protein, 5 aa, Homo sapiens
KLHST

SEQ ID NO: 6847 - protein, 5 aa, Homo sapiens
MQTVL

SEQ ID NO: 6848 - protein, 5 aa, Homo sapiens
GDAEW

SEQ ID NO: 6849 - protein, 5 aa, Homo sapiens
EEDDE

SEQ ID NO: 6850 - protein, 5 aa, Homo sapiens
QHCSQ

SEQ ID NO: 6851 - protein, 5 aa, Homo sapiens
IWRSV

SEQ ID NO: 6852 - protein, 5 aa, Homo sapiens
VASNV

SEQ ID NO: 6853 - protein, 5 aa, Homo sapiens
LWLLG

SEQ ID NO: 6854 - protein, 5 aa, Homo sapiens
LQLSK

SEQ ID NO: 6855 - protein, 5 aa, Homo sapiens
KTNLF

SEQ ID NO: 6856 - protein, 5 aa, Homo sapiens
QVQPQ

SEQ ID NO: 6857 - protein, 5 aa, Homo sapiens
VEISA

SEQ ID NO: 6858 - protein, 5 aa, Homo sapiens
TVESV

SEQ ID NO: 6859 - protein, 5 aa, Homo sapiens
SDSLE

SEQ ID NO: 6860 - protein, 5 aa, Homo sapiens
RVLHS

SEQ ID NO: 6861 - protein, 5 aa, Homo sapiens
SDMLK

SEQ ID NO: 6862 - protein, 5 aa, Homo sapiens
LYDLD

SEQ ID NO: 6863 - protein, 5 aa, Homo sapiens
VIHEL

SEQ ID NO: 6864 - protein, 5 aa, Homo sapiens
NFCPE

SEQ ID NO: 6865 - protein, 5 aa, Homo sapiens
PCSVI

SEQ ID NO: 6866 - protein, 5 aa, Homo sapiens
VAGLR

SEQ ID NO: 6867 - protein, 5 aa, Homo sapiens
NTSGS

SEQ ID NO: 6868 - protein, 5 aa, Homo sapiens
NVKRK

SEQ ID NO: 6869 - protein, 5 aa, Homo sapiens
VHTPH

SEQ ID NO: 6870 - protein, 5 aa, Homo sapiens
SNYKS

SEQ ID NO: 6871 - protein, 5 aa, Homo sapiens
CLGAQ

SEQ ID NO: 6872 - protein, 5 aa, Homo sapiens
IHMGD

SEQ ID NO: 6873 - protein, 5 aa, Homo sapiens
QNQYH

SEQ ID NO: 6874 - protein, 5 aa, Homo sapiens
GWDGE

SEQ ID NO: 6875 - protein, 5 aa, Homo sapiens
FHIEY

SEQ ID NO: 6876 - protein, 5 aa, Homo sapiens
MKPVS

SEQ ID NO: 6877 - protein, 5 aa, Homo sapiens
EEDDE

SEQ ID NO: 6878 - protein, 5 aa, Homo sapiens
KLWLR

SEQ ID NO: 6879 - protein, 5 aa, Homo sapiens
YSNNP

SEQ ID NO: 6880 - protein, 5 aa, Homo sapiens
AGPPA

SEQ ID NO: 6881 - protein, 5 aa, Homo sapiens
DQNKG

SEQ ID NO: 6882 - protein, 5 aa, Homo sapiens
ESESD

SEQ ID NO: 6883 - protein, 5 aa, Homo sapiens
QTSQI

SEQ ID NO: 6884 - protein, 5 aa, Homo sapiens
QKVNQ

SEQ ID NO: 6885 - protein, 5 aa, Homo sapiens
VDQLP

SEQ ID NO: 6886 - protein, 5 aa, Homo sapiens
RRRLV

SEQ ID NO: 6887 - protein, 5 aa, Homo sapiens
NYFLA

SEQ ID NO: 6888 - protein, 5 aa, Homo sapiens
PKKIP

SEQ ID NO: 6889 - protein, 5 aa, Homo sapiens
HHEHS

SEQ ID NO: 6890 - protein, 5 aa, Homo sapiens
AKYKA

SEQ ID NO: 6891 - protein, 5 aa, Homo sapiens
VHTAP

SEQ ID NO: 6892 - protein, 5 aa, Homo sapiens
TPTGF

SEQ ID NO: 6893 - protein, 5 aa, Homo sapiens
LEPER

SEQ ID NO: 6894 - protein, 5 aa, Homo sapiens
PVINV

SEQ ID NO: 6895 - protein, 5 aa, Homo sapiens
ELVEK

SEQ ID NO: 6896 - protein, 5 aa, Homo sapiens
SAGSG

SEQ ID NO: 6897 - protein, 5 aa, Homo sapiens
RVERV

SEQ ID NO: 6898 - protein, 5 aa, Homo sapiens
KAMPS

SEQ ID NO: 6899 - protein, 5 aa, Homo sapiens
IALWA

SEQ ID NO: 6900 - protein, 5 aa, Homo sapiens
MEVSC

SEQ ID NO: 6901 - protein, 5 aa, Homo sapiens
LDRVL

SEQ ID NO: 6902 - protein, 5 aa, Homo sapiens
PTTPL

SEQ ID NO: 6903 - protein, 5 aa, Homo sapiens
RNGSK

SEQ ID NO: 6904 - protein, 5 aa, Homo sapiens
LYFSQ

SEQ ID NO: 6905 - protein, 5 aa, Homo sapiens
TSCPK

SEQ ID NO: 6906 - protein, 5 aa, Homo sapiens
GVSPC

SEQ ID NO: 6907 - protein, 5 aa, Homo sapiens
KPKNL

SEQ ID NO: 6908 - protein, 5 aa, Homo sapiens
AADPL

SEQ ID NO: 6909 - protein, 5 aa, Homo sapiens
SKLWF

SEQ ID NO: 6910 - protein, 5 aa, Homo sapiens
LGPLF

SEQ ID NO: 6911 - protein, 5 aa, Homo sapiens
VIKTC

SEQ ID NO: 6912 - protein, 5 aa, Homo sapiens
SLYPC

SEQ ID NO: 6913 - protein, 5 aa, Homo sapiens
DFLNY

SEQ ID NO: 6914 - protein, 5 aa, Homo sapiens
ANARL

SEQ ID NO: 6915 - protein, 5 aa, Homo sapiens
FSIKL

SEQ ID NO: 6916 - protein, 5 aa, Homo sapiens
TCQWN

SEQ ID NO: 6917 - protein, 5 aa, Homo sapiens
AHTKI

SEQ ID NO: 6918 - protein, 5 aa, Homo sapiens
EPRNR

SEQ ID NO: 6919 - protein, 5 aa, Homo sapiens
ECVGA

SEQ ID NO: 6920 - protein, 5 aa, Homo sapiens
DPTKP

SEQ ID NO: 6921 - protein, 5 aa, Homo sapiens
LQYYA

SEQ ID NO: 6922 - protein, 5 aa, Homo sapiens
KPGFV

SEQ ID NO: 6923 - protein, 5 aa, Homo sapiens
QYAIV

SEQ ID NO: 6924 - protein, 5 aa, Homo sapiens
ALLPS

SEQ ID NO: 6925 - protein, 5 aa, Homo sapiens
CREDD

SEQ ID NO: 6926 - protein, 5 aa, Homo sapiens
EGNFT

SEQ ID NO: 6927 - protein, 5 aa, Homo sapiens
SPPSS

SEQ ID NO: 6928 - protein, 5 aa, Homo sapiens
IARFY

SEQ ID NO: 6929 - protein, 5 aa, Homo sapiens
RTSVE

SEQ ID NO: 6930 - protein, 5 aa, Homo sapiens
DVSRL

SEQ ID NO: 6931 - protein, 5 aa, Homo sapiens
SVTTV

SEQ ID NO: 6932 - protein, 5 aa, Homo sapiens
LGTQC

SEQ ID NO: 6933 - protein, 5 aa, Homo sapiens
CLQNN

SEQ ID NO: 6934 - protein, 5 aa, Homo sapiens
WLTFK

SEQ ID NO: 6935 - protein, 5 aa, Homo sapiens
IIYAD

SEQ ID NO: 6936 - protein, 5 aa, Homo sapiens
LGSPG

SEQ ID NO: 6937 - protein, 5 aa, Homo sapiens
PTITE

SEQ ID NO: 6938 - protein, 5 aa, Homo sapiens
EQEGV

SEQ ID NO: 6939 - protein, 5 aa, Homo sapiens
ITSRV

SEQ ID NO: 6940 - protein, 5 aa, Homo sapiens
HLFYL

SEQ ID NO: 6941 - protein, 5 aa, Homo sapiens
KRKIR

SEQ ID NO: 6942 - protein, 5 aa, Homo sapiens
SPPTN

SEQ ID NO: 6943 - protein, 5 aa, Homo sapiens
HKAAG

SEQ ID NO: 6944 - protein, 5 aa, Homo sapiens
VEKDE

SEQ ID NO: 6945 - protein, 5 aa, Homo sapiens
PKVDS

SEQ ID NO: 6946 - protein, 5 aa, Homo sapiens
SSFVI

SEQ ID NO: 6947 - protein, 5 aa, Homo sapiens
KKMRA

SEQ ID NO: 6948 - protein, 5 aa, Homo sapiens
SGSQE

SEQ ID NO: 6949 - protein, 5 aa, Homo sapiens
DKPTL

SEQ ID NO: 6950 - protein, 5 aa, Homo sapiens
EGLIL

SEQ ID NO: 6951 - protein, 5 aa, Homo sapiens
SSSDC

SEQ ID NO: 6952 - protein, 5 aa, Homo sapiens
AEAEA

SEQ ID NO: 6953 - protein, 5 aa, Homo sapiens
IGGDF

SEQ ID NO: 6954 - protein, 5 aa, Homo sapiens
PIALL

SEQ ID NO: 6955 - protein, 5 aa, Homo sapiens
KGRYN

SEQ ID NO: 6956 - protein, 5 aa, Homo sapiens
VLRPC

SEQ ID NO: 6957 - protein, 5 aa, Homo sapiens
VHYEI

SEQ ID NO: 6958 - protein, 5 aa, Homo sapiens
SRPQK

SEQ ID NO: 6959 - protein, 5 aa, Homo sapiens
IPVST

SEQ ID NO: 6960 - protein, 5 aa, Homo sapiens
PSMAL

SEQ ID NO: 6961 - protein, 5 aa, Homo sapiens
KRLTS

SEQ ID NO: 6962 - protein, 5 aa, Homo sapiens
ISSVA

SEQ ID NO: 6963 - protein, 5 aa, Homo sapiens
MPAQK

SEQ ID NO: 6964 - protein, 5 aa, Homo sapiens
LWPPG

SEQ ID NO: 6965 - protein, 5 aa, Homo sapiens
AERDW

SEQ ID NO: 6966 - protein, 5 aa, Homo sapiens
SRACV

SEQ ID NO: 6967 - protein, 5 aa, Homo sapiens
SMDTS

SEQ ID NO: 6968 - protein, 5 aa, Homo sapiens
RGRLY

SEQ ID NO: 6969 - protein, 5 aa, Homo sapiens
NGTRL

SEQ ID NO: 6970 - protein, 5 aa, Homo sapiens
PLHAA

SEQ ID NO: 6971 - protein, 5 aa, Homo sapiens
AACLP

SEQ ID NO: 6972 - protein, 5 aa, Homo sapiens
PPRDL

SEQ ID NO: 6973 - protein, 5 aa, Homo sapiens
VSKLA

SEQ ID NO: 6974 - protein, 5 aa, Homo sapiens
NHHDC

SEQ ID NO: 6975 - protein, 5 aa, Homo sapiens
PRAES

SEQ ID NO: 6976 - protein, 5 aa, Homo sapiens
TDLPM

SEQ ID NO: 6977 - protein, 5 aa, Homo sapiens
SGMEV

SEQ ID NO: 6978 - protein, 5 aa, Homo sapiens
SPKPH

SEQ ID NO: 6979 - protein, 5 aa, Homo sapiens
AVSMT

SEQ ID NO: 6980 - protein, 5 aa, Homo sapiens
DHHPC

SEQ ID NO: 6981 - protein, 5 aa, Homo sapiens
LQDQM

SEQ ID NO: 6982 - protein, 5 aa, Homo sapiens
NRIRV

SEQ ID NO: 6983 - protein, 5 aa, Homo sapiens
PLEQL

SEQ ID NO: 6984 - protein, 5 aa, Homo sapiens
AFQTV

SEQ ID NO: 6985 - protein, 5 aa, Homo sapiens
FVPVA

SEQ ID NO: 6986 - protein, 5 aa, Homo sapiens
LQPGR

SEQ ID NO: 6987 - protein, 5 aa, Homo sapiens
VPVEE

SEQ ID NO: 6988 - protein, 5 aa, Homo sapiens
VPGYN

SEQ ID NO: 6989 - protein, 5 aa, Homo sapiens
EEEEY

SEQ ID NO: 6990 - protein, 5 aa, Homo sapiens
KNAYV

SEQ ID NO: 6991 - protein, 5 aa, Homo sapiens
GNARK

SEQ ID NO: 6992 - protein, 5 aa, Homo sapiens
SDKET

SEQ ID NO: 6993 - protein, 5 aa, Homo sapiens
YRRCA

SEQ ID NO: 6994 - protein, 5 aa, Homo sapiens
FIYMA

SEQ ID NO: 6995 - protein, 5 aa, Homo sapiens
NHLLK

SEQ ID NO: 6996 - protein, 5 aa, Homo sapiens
NFLPL

SEQ ID NO: 6997 - protein, 5 aa, Homo sapiens
DLGFL

SEQ ID NO: 6998 - protein, 5 aa, Homo sapiens
SAFHS

SEQ ID NO: 6999 - protein, 5 aa, Homo sapiens
RSLFA

SEQ ID NO: 7000 - protein, 5 aa, Homo sapiens
TPSSG

SEQ ID NO: 7001 - protein, 5 aa, Homo sapiens
EEEDT

SEQ ID NO: 7002 - protein, 5 aa, Homo sapiens
KSQAD

SEQ ID NO: 7003 - protein, 5 aa, Homo sapiens
KMQDK

SEQ ID NO: 7004 - protein, 5 aa, Homo sapiens
PHYFT

SEQ ID NO: 7005 - protein, 5 aa, Homo sapiens
TLLNP

SEQ ID NO: 7006 - protein, 5 aa, Homo sapiens
VDGGI

SEQ ID NO: 7007 - protein, 5 aa, Homo sapiens
DSMEF

SEQ ID NO: 7008 - protein, 5 aa, Homo sapiens
TELHI

SEQ ID NO: 7009 - protein, 5 aa, Homo sapiens
TKTNI

SEQ ID NO: 7010 - protein, 5 aa, Homo sapiens
TRNFP

SEQ ID NO: 7011 - protein, 5 aa, Homo sapiens
EIGIN

SEQ ID NO: 7012 - protein, 5 aa, Homo sapiens
WWWCF

SEQ ID NO: 7013 - protein, 5 aa, Homo sapiens
VGQIS

SEQ ID NO: 7014 - protein, 5 aa, Homo sapiens
MIFTY

SEQ ID NO: 7015 - protein, 5 aa, Homo sapiens
RFSSP

SEQ ID NO: 7016 - protein, 5 aa, Homo sapiens
YLPQY

SEQ ID NO: 7017 - protein, 5 aa, Homo sapiens
VRIYS

SEQ ID NO: 7018 - protein, 5 aa, Homo sapiens
VKDLD

SEQ ID NO: 7019 - protein, 5 aa, Homo sapiens
IYVRE

SEQ ID NO: 7020 - protein, 5 aa, Homo sapiens
AGTTG

SEQ ID NO: 7021 - protein, 5 aa, Homo sapiens
LNDLM

SEQ ID NO: 7022 - protein, 5 aa, Homo sapiens
SISQV

SEQ ID NO: 7023 - protein, 5 aa, Homo sapiens
MAGAK

SEQ ID NO: 7024 - protein, 5 aa, Homo sapiens
GNANK

SEQ ID NO: 7025 - protein, 5 aa, Homo sapiens
TVSNF

SEQ ID NO: 7026 - protein, 5 aa, Homo sapiens
THRIL

SEQ ID NO: 7027 - protein, 5 aa, Homo sapiens
KQKFE

SEQ ID NO: 7028 - protein, 5 aa, Homo sapiens
ALPKD

SEQ ID NO: 7029 - protein, 5 aa, Homo sapiens
EEDDD

SEQ ID NO: 7030 - protein, 5 aa, Homo sapiens
LLQEE

SEQ ID NO: 7031 - protein, 5 aa, Homo sapiens
EKKKD

SEQ ID NO: 7032 - protein, 5 aa, Homo sapiens
DLQDP

SEQ ID NO: 7033 - protein, 5 aa, Homo sapiens
SLTIY

SEQ ID NO: 7034 - protein, 5 aa, Homo sapiens
KTKKQ

SEQ ID NO: 7035 - protein, 5 aa, Homo sapiens
TSEGT

SEQ ID NO: 7036 - protein, 5 aa, Homo sapiens
HSSLG

SEQ ID NO: 7037 - protein, 5 aa, Homo sapiens
FTIPQ

SEQ ID NO: 7038 - protein, 5 aa, Homo sapiens
KGKSL

SEQ ID NO: 7039 - protein, 5 aa, Homo sapiens
GTTLN

SEQ ID NO: 7040 - protein, 5 aa, Homo sapiens
IREST

SEQ ID NO: 7041 - protein, 5 aa, Homo sapiens
ATQKS

SEQ ID NO: 7042 - protein, 5 aa, Homo sapiens
ELQEA

SEQ ID NO: 7043 - protein, 5 aa, Homo sapiens
PERIV

SEQ ID NO: 7044 - protein, 5 aa, Homo sapiens
RKHCP

SEQ ID NO: 7045 - protein, 5 aa, Homo sapiens
RAVHS

SEQ ID NO: 7046 - protein, 5 aa, Homo sapiens
VWEMF

SEQ ID NO: 7047 - protein, 5 aa, Homo sapiens
LKRES

SEQ ID NO: 7048 - protein, 5 aa, Homo sapiens
KCSVM

SEQ ID NO: 7049 - protein, 5 aa, Homo sapiens
NCTHV

SEQ ID NO: 7050 - protein, 5 aa, Homo sapiens
LLLET

SEQ ID NO: 7051 - protein, 5 aa, Homo sapiens
NMSKE

SEQ ID NO: 7052 - protein, 5 aa, Homo sapiens
LKATV

SEQ ID NO: 7053 - protein, 5 aa, Homo sapiens
DLSVL

SEQ ID NO: 7054 - protein, 5 aa, Homo sapiens
LSARS

SEQ ID NO: 7055 - protein, 5 aa, Homo sapiens
YPYTS

SEQ ID NO: 7056 - protein, 5 aa, Homo sapiens
LSSRY

SEQ ID NO: 7057 - protein, 5 aa, Homo sapiens
EKDEL

SEQ ID NO: 7058 - protein, 5 aa, Homo sapiens
RGSRL

SEQ ID NO: 7059 - protein, 5 aa, Homo sapiens
CCRIS

SEQ ID NO: 7060 - protein, 5 aa, Homo sapiens
DEFNR

SEQ ID NO: 7061 - protein, 5 aa, Homo sapiens
SKDFA

SEQ ID NO: 7062 - protein, 5 aa, Homo sapiens
GTVQS

SEQ ID NO: 7063 - protein, 5 aa, Homo sapiens
SWLNC

SEQ ID NO: 7064 - protein, 5 aa, Homo sapiens
EIHQH

SEQ ID NO: 7065 - protein, 5 aa, Homo sapiens
IGEKP

SEQ ID NO: 7066 - protein, 5 aa, Homo sapiens
QDGVL

SEQ ID NO: 7067 - protein, 5 aa, Homo sapiens
SSMTK

SEQ ID NO: 7068 - protein, 5 aa, Homo sapiens
VDVLM

SEQ ID NO: 7069 - protein, 5 aa, Homo sapiens
LSPQV

SEQ ID NO: 7070 - protein, 5 aa, Homo sapiens
PPTGN

SEQ ID NO: 7071 - protein, 5 aa, Homo sapiens
WSGTL

SEQ ID NO: 7072 - protein, 5 aa, Homo sapiens
FNDVL

SEQ ID NO: 7073 - protein, 5 aa, Homo sapiens
LSRPL

SEQ ID NO: 7074 - protein, 5 aa, Homo sapiens
LHVSP

SEQ ID NO: 7075 - protein, 5 aa, Homo sapiens
LKASV

SEQ ID NO: 7076 - protein, 5 aa, Homo sapiens
NLEDK

SEQ ID NO: 7077 - protein, 5 aa, Homo sapiens
LGHLL

SEQ ID NO: 7078 - protein, 5 aa, Homo sapiens
CHVDF

SEQ ID NO: 7079 - protein, 5 aa, Homo sapiens
QCNIM

SEQ ID NO: 7080 - protein, 5 aa, Homo sapiens
LKVQT

SEQ ID NO: 7081 - protein, 5 aa, Homo sapiens
DNGWD

SEQ ID NO: 7082 - protein, 5 aa, Homo sapiens
AIAKE

SEQ ID NO: 7083 - protein, 5 aa, Homo sapiens
VLEPD

SEQ ID NO: 7084 - protein, 5 aa, Homo sapiens
NDEKE

SEQ ID NO: 7085 - protein, 5 aa, Homo sapiens
PGKVL

SEQ ID NO: 7086 - protein, 5 aa, Homo sapiens
LRKKS

SEQ ID NO: 7087 - protein, 5 aa, Homo sapiens
KLKTR

SEQ ID NO: 7088 - protein, 5 aa, Homo sapiens
PEEPK

SEQ ID NO: 7089 - protein, 5 aa, Homo sapiens
TENSK

SEQ ID NO: 7090 - protein, 5 aa, Homo sapiens
MLDEL

SEQ ID NO: 7091 - protein, 5 aa, Homo sapiens
YRQFC

SEQ ID NO: 7092 - protein, 5 aa, Homo sapiens
NLVPF

SEQ ID NO: 7093 - protein, 5 aa, Homo sapiens
EFRKK

SEQ ID NO: 7094 - protein, 5 aa, Homo sapiens
PLTQV

SEQ ID NO: 7095 - protein, 5 aa, Homo sapiens
RLKAS

SEQ ID NO: 7096 - protein, 5 aa, Homo sapiens
PLTPS

SEQ ID NO: 7097 - protein, 5 aa, Homo sapiens
KNPDS

SEQ ID NO: 7098 - protein, 5 aa, Homo sapiens
RTTPV

SEQ ID NO: 7099 - protein, 5 aa, Homo sapiens
DAANS

SEQ ID NO: 7100 - protein, 5 aa, Homo sapiens
IRILK

SEQ ID NO: 7101 - protein, 5 aa, Homo sapiens
EVTVQ

SEQ ID NO: 7102 - protein, 5 aa, Homo sapiens
SRKWG

SEQ ID NO: 7103 - protein, 5 aa, Homo sapiens
NNFLT

SEQ ID NO: 7104 - protein, 5 aa, Homo sapiens
EASRQ

SEQ ID NO: 7105 - protein, 5 aa, Homo sapiens
ANPSW

SEQ ID NO: 7106 - protein, 5 aa, Homo sapiens
YYSNI

SEQ ID NO: 7107 - protein, 5 aa, Homo sapiens
VQGIR

SEQ ID NO: 7108 - protein, 5 aa, Homo sapiens
AQQKL

SEQ ID NO: 7109 - protein, 5 aa, Homo sapiens
MPKRV

SEQ ID NO: 7110 - protein, 5 aa, Homo sapiens
GEGEN

SEQ ID NO: 7111 - protein, 5 aa, Homo sapiens
RAKQK

SEQ ID NO: 7112 - protein, 5 aa, Homo sapiens
DKDPE

SEQ ID NO: 7113 - protein, 5 aa, Homo sapiens
TNPFL

SEQ ID NO: 7114 - protein, 5 aa, Homo sapiens
SIDLD

SEQ ID NO: 7115 - protein, 5 aa, Homo sapiens
WDTAI

SEQ ID NO: 7116 - protein, 5 aa, Homo sapiens
NGPSV

SEQ ID NO: 7117 - protein, 5 aa, Homo sapiens
WKQTV

SEQ ID NO: 7118 - protein, 5 aa, Homo sapiens
SRSWI

SEQ ID NO: 7119 - protein, 5 aa, Homo sapiens
NPLTG

SEQ ID NO: 7120 - protein, 5 aa, Homo sapiens
CEQCC

SEQ ID NO: 7121 - protein, 5 aa, Homo sapiens
NIGIN

SEQ ID NO: 7122 - protein, 5 aa, Homo sapiens
EPRPA

SEQ ID NO: 7123 - protein, 5 aa, Homo sapiens
SELEL

SEQ ID NO: 7124 - protein, 5 aa, Homo sapiens
PELSA

SEQ ID NO: 7125 - protein, 5 aa, Homo sapiens
IQANK

SEQ ID NO: 7126 - protein, 5 aa, Homo sapiens
EKGKS

SEQ ID NO: 7127 - protein, 5 aa, Homo sapiens
KTVAT

SEQ ID NO: 7128 - protein, 5 aa, Homo sapiens
QQEEY

SEQ ID NO: 7129 - protein, 5 aa, Homo sapiens
MGQFY

SEQ ID NO: 7130 - protein, 5 aa, Homo sapiens
RRGGV

SEQ ID NO: 7131 - protein, 5 aa, Homo sapiens
IHTKH

SEQ ID NO: 7132 - protein, 5 aa, Homo sapiens
AQEDL

SEQ ID NO: 7133 - protein, 5 aa, Homo sapiens
NFIYN

SEQ ID NO: 7134 - protein, 5 aa, Homo sapiens
PAIAN

SEQ ID NO: 7135 - protein, 5 aa, Homo sapiens
LEADI

SEQ ID NO: 7136 - protein, 5 aa, Homo sapiens
SHIRN

SEQ ID NO: 7137 - protein, 5 aa, Homo sapiens
GKSAP

SEQ ID NO: 7138 - protein, 5 aa, Homo sapiens
LQCAA

SEQ ID NO: 7139 - protein, 5 aa, Homo sapiens
GCLIS

SEQ ID NO: 7140 - protein, 5 aa, Homo sapiens
LQLPQ

SEQ ID NO: 7141 - protein, 5 aa, Homo sapiens
GGPRR

SEQ ID NO: 7142 - protein, 5 aa, Homo sapiens
EDNYL

SEQ ID NO: 7143 - protein, 5 aa, Homo sapiens
IYHSS

SEQ ID NO: 7144 - protein, 5 aa, Homo sapiens
DNPAF

SEQ ID NO: 7145 - protein, 5 aa, Homo sapiens
VIESH

SEQ ID NO: 7146 - protein, 5 aa, Homo sapiens
RHLNL

SEQ ID NO: 7147 - protein, 5 aa, Homo sapiens
VQGLA

SEQ ID NO: 7148 - protein, 5 aa, Homo sapiens
GEEKL

SEQ ID NO: 7149 - protein, 5 aa, Homo sapiens
AHLTD

SEQ ID NO: 7150 - protein, 5 aa, Homo sapiens
KDFFL

SEQ ID NO: 7151 - protein, 5 aa, Homo sapiens
NITII

SEQ ID NO: 7152 - protein, 5 aa, Homo sapiens
TWIYP

SEQ ID NO: 7153 - protein, 5 aa, Homo sapiens
IRWIC

SEQ ID NO: 7154 - protein, 5 aa, Homo sapiens
GRSSK

SEQ ID NO: 7155 - protein, 5 aa, Homo sapiens
GRHLW

SEQ ID NO: 7156 - protein, 5 aa, Homo sapiens
DEDFS

SEQ ID NO: 7157 - protein, 5 aa, Homo sapiens
FQKGA

SEQ ID NO: 7158 - protein, 5 aa, Homo sapiens
VMQDT

SEQ ID NO: 7159 - protein, 5 aa, Homo sapiens
KSGWS

SEQ ID NO: 7160 - protein, 5 aa, Homo sapiens
TRLLL

SEQ ID NO: 7161 - protein, 5 aa, Homo sapiens
LQHLL

SEQ ID NO: 7162 - protein, 5 aa, Homo sapiens
HQTYF

SEQ ID NO: 7163 - protein, 5 aa, Homo sapiens
KPLLY

SEQ ID NO: 7164 - protein, 5 aa, Homo sapiens
RGVPY

SEQ ID NO: 7165 - protein, 5 aa, Homo sapiens
DTILT

SEQ ID NO: 7166 - protein, 5 aa, Homo sapiens
CPTLK

SEQ ID NO: 7167 - protein, 5 aa, Homo sapiens
ALIGN

SEQ ID NO: 7168 - protein, 5 aa, Homo sapiens
KFKLD

SEQ ID NO: 7169 - protein, 5 aa, Homo sapiens
RSDGL

SEQ ID NO: 7170 - protein, 5 aa, Homo sapiens
TMNPG

SEQ ID NO: 7171 - protein, 5 aa, Homo sapiens
TELLL

SEQ ID NO: 7172 - protein, 5 aa, Homo sapiens
YSAPA

SEQ ID NO: 7173 - protein, 5 aa, Homo sapiens
IGYDV

SEQ ID NO: 7174 - protein, 5 aa, Homo sapiens
WARNK

SEQ ID NO: 7175 - protein, 5 aa, Homo sapiens
AFLNA

SEQ ID NO: 7176 - protein, 5 aa, Homo sapiens
KPLKK

SEQ ID NO: 7177 - protein, 5 aa, Homo sapiens
LMCGS

SEQ ID NO: 7178 - protein, 5 aa, Homo sapiens
LDGED

SEQ ID NO: 7179 - protein, 5 aa, Homo sapiens
SSDIP

SEQ ID NO: 7180 - protein, 5 aa, Homo sapiens
HRIGT

SEQ ID NO: 7181 - protein, 5 aa, Homo sapiens
NMHSR

SEQ ID NO: 7182 - protein, 5 aa, Homo sapiens
RRLLK

SEQ ID NO: 7183 - protein, 5 aa, Homo sapiens
SRRGT

SEQ ID NO: 7184 - protein, 5 aa, Homo sapiens
PEPAQ

SEQ ID NO: 7185 - protein, 5 aa, Homo sapiens
QPHWT

SEQ ID NO: 7186 - protein, 5 aa, Homo sapiens
EEGPA

SEQ ID NO: 7187 - protein, 5 aa, Homo sapiens
LSFSL

SEQ ID NO: 7188 - protein, 5 aa, Homo sapiens
TREKL

SEQ ID NO: 7189 - protein, 5 aa, Homo sapiens
FCVLL

SEQ ID NO: 7190 - protein, 5 aa, Homo sapiens
AGFLR

SEQ ID NO: 7191 - protein, 5 aa, Homo sapiens
GVLEL

SEQ ID NO: 7192 - protein, 5 aa, Homo sapiens
KAVTQ

SEQ ID NO: 7193 - protein, 5 aa, Homo sapiens
RCVLL

SEQ ID NO: 7194 - protein, 5 aa, Homo sapiens
EFVVA

SEQ ID NO: 7195 - protein, 5 aa, Homo sapiens
LPAGT

SEQ ID NO: 7196 - protein, 5 aa, Homo sapiens
GKGRD

SEQ ID NO: 7197 - protein, 5 aa, Homo sapiens
VPGGT

SEQ ID NO: 7198 - protein, 5 aa, Homo sapiens
AGTRR

SEQ ID NO: 7199 - protein, 5 aa, Homo sapiens
PGKPK

SEQ ID NO: 7200 - protein, 5 aa, Homo sapiens
RQTTR

SEQ ID NO: 7201 - protein, 5 aa, Homo sapiens
HKKIH

SEQ ID NO: 7202 - protein, 5 aa, Homo sapiens
RGFLP

SEQ ID NO: 7203 - protein, 5 aa, Homo sapiens
IPGKA

SEQ ID NO: 7204 - protein, 5 aa, Homo sapiens
PKPAA

SEQ ID NO: 7205 - protein, 5 aa, Homo sapiens
TREKE

SEQ ID NO: 7206 - protein, 5 aa, Homo sapiens
AEEGL

SEQ ID NO: 7207 - protein, 5 aa, Homo sapiens
MIQVC

SEQ ID NO: 7208 - protein, 5 aa, Homo sapiens
SHLKE

SEQ ID NO: 7209 - protein, 5 aa, Homo sapiens
MGERG

SEQ ID NO: 7210 - protein, 5 aa, Homo sapiens
QNLVY

SEQ ID NO: 7211 - protein, 5 aa, Homo sapiens
NPNLS

SEQ ID NO: 7212 - protein, 5 aa, Homo sapiens
GTSVF

SEQ ID NO: 7213 - protein, 5 aa, Homo sapiens
PTCCP

SEQ ID NO: 7214 - protein, 5 aa, Homo sapiens
LCEKL

SEQ ID NO: 7215 - protein, 5 aa, Homo sapiens
PKDSY

SEQ ID NO: 7216 - protein, 5 aa, Homo sapiens
GESSE

SEQ ID NO: 7217 - protein, 5 aa, Homo sapiens
VNVCK

SEQ ID NO: 7218 - protein, 5 aa, Homo sapiens
RKWMN

SEQ ID NO: 7219 - protein, 5 aa, Homo sapiens
RCHLM

SEQ ID NO: 7220 - protein, 5 aa, Homo sapiens
EGEEY

SEQ ID NO: 7221 - protein, 5 aa, Homo sapiens
EGEEY

SEQ ID NO: 7222 - protein, 5 aa, Homo sapiens
KGEPA

SEQ ID NO: 7223 - protein, 5 aa, Homo sapiens
TGKKS

SEQ ID NO: 7224 - protein, 5 aa, Homo sapiens
SNTCN

SEQ ID NO: 7225 - protein, 5 aa, Homo sapiens
SFLPR

SEQ ID NO: 7226 - protein, 5 aa, Homo sapiens
SFLPR

SEQ ID NO: 7227 - protein, 5 aa, Homo sapiens
HPEHM

SEQ ID NO: 7228 - protein, 5 aa, Homo sapiens
MYERQ

SEQ ID NO: 7229 - protein, 5 aa, Homo sapiens
LIRMQ

SEQ ID NO: 7230 - protein, 5 aa, Homo sapiens
AITST

SEQ ID NO: 7231 - protein, 5 aa, Homo sapiens
QEDGA

SEQ ID NO: 7232 - protein, 5 aa, Homo sapiens
VAYNM

SEQ ID NO: 7233 - protein, 5 aa, Homo sapiens
RMAQK

SEQ ID NO: 7234 - protein, 5 aa, Homo sapiens
DVIGL

SEQ ID NO: 7235 - protein, 5 aa, Homo sapiens
GFDAP

SEQ ID NO: 7236 - protein, 5 aa, Homo sapiens
PLRDL

SEQ ID NO: 7237 - protein, 5 aa, Homo sapiens
DTAFV

SEQ ID NO: 7238 - protein, 5 aa, Homo sapiens
SNFHV

SEQ ID NO: 7239 - protein, 5 aa, Homo sapiens
AAAGR

SEQ ID NO: 7240 - protein, 5 aa, Homo sapiens
LEAQA

SEQ ID NO: 7241 - protein, 5 aa, Homo sapiens
KIHTH

SEQ ID NO: 7242 - protein, 5 aa, Homo sapiens
RTAHP

SEQ ID NO: 7243 - protein, 5 aa, Homo sapiens
NTYVL

SEQ ID NO: 7244 - protein, 5 aa, Homo sapiens
KEAPH

SEQ ID NO: 7245 - protein, 5 aa, Homo sapiens
SKTGV

SEQ ID NO: 7246 - protein, 5 aa, Homo sapiens
GPGQL

SEQ ID NO: 7247 - protein, 5 aa, Homo sapiens
LHRSS

SEQ ID NO: 7248 - protein, 5 aa, Homo sapiens
LAPSL

SEQ ID NO: 7249 - protein, 5 aa, Homo sapiens
ECGLR

SEQ ID NO: 7250 - protein, 5 aa, Homo sapiens
KVGEE

SEQ ID NO: 7251 - protein, 5 aa, Homo sapiens
PLGAS

SEQ ID NO: 7252 - protein, 5 aa, Homo sapiens
IEKLL

SEQ ID NO: 7253 - protein, 5 aa, Homo sapiens
LDEES

SEQ ID NO: 7254 - protein, 5 aa, Homo sapiens
PAGGQ

SEQ ID NO: 7255 - protein, 5 aa, Homo sapiens
APPVP

SEQ ID NO: 7256 - protein, 5 aa, Homo sapiens
TRVEI

SEQ ID NO: 7257 - protein, 5 aa, Homo sapiens
DDITF

SEQ ID NO: 7258 - protein, 5 aa, Homo sapiens
SLPSP

SEQ ID NO: 7259 - protein, 5 aa, Homo sapiens
LQVAR

SEQ ID NO: 7260 - protein, 5 aa, Homo sapiens
PSTFL

SEQ ID NO: 7261 - protein, 5 aa, Homo sapiens
CWQRR

SEQ ID NO: 7262 - protein, 5 aa, Homo sapiens
AAPEA

SEQ ID NO: 7263 - protein, 5 aa, Homo sapiens
QGGME

SEQ ID NO: 7264 - protein, 5 aa, Homo sapiens
CSFPL

SEQ ID NO: 7265 - protein, 5 aa, Homo sapiens
TEPDS

SEQ ID NO: 7266 - protein, 5 aa, Homo sapiens
DIVSE

SEQ ID NO: 7267 - protein, 5 aa, Homo sapiens
RLPGP

SEQ ID NO: 7268 - protein, 5 aa, Homo sapiens
PILPQ

SEQ ID NO: 7269 - protein, 5 aa, Homo sapiens
RTGRA

SEQ ID NO: 7270 - protein, 5 aa, Homo sapiens
ELLLV

SEQ ID NO: 7271 - protein, 5 aa, Homo sapiens
IAENS

SEQ ID NO: 7272 - protein, 5 aa, Homo sapiens
PEGPS

SEQ ID NO: 7273 - protein, 5 aa, Homo sapiens
SEVSE

SEQ ID NO: 7274 - protein, 5 aa, Homo sapiens
DDKDC

SEQ ID NO: 7275 - protein, 5 aa, Homo sapiens
AEAAS

SEQ ID NO: 7276 - protein, 5 aa, Homo sapiens
DQPYL

SEQ ID NO: 7277 - protein, 5 aa, Homo sapiens
KTSLP

SEQ ID NO: 7278 - protein, 5 aa, Homo sapiens
PAPSL

SEQ ID NO: 7279 - protein, 5 aa, Homo sapiens
HPLSG

SEQ ID NO: 7280 - protein, 5 aa, Homo sapiens
TGSSG

SEQ ID NO: 7281 - protein, 5 aa, Homo sapiens
WSCHT

SEQ ID NO: 7282 - protein, 5 aa, Homo sapiens
HNRWI

SEQ ID NO: 7283 - protein, 5 aa, Homo sapiens
HLKTH

SEQ ID NO: 7284 - protein, 5 aa, Homo sapiens
RNART

SEQ ID NO: 7285 - protein, 5 aa, Homo sapiens
FSKHN

SEQ ID NO: 7286 - protein, 5 aa, Homo sapiens
SFKSM

SEQ ID NO: 7287 - protein, 5 aa, Homo sapiens
KVDSS

SEQ ID NO: 7288 - protein, 5 aa, Homo sapiens
HKKTH

SEQ ID NO: 7289 - protein, 5 aa, Homo sapiens
RVDMD

SEQ ID NO: 7290 - protein, 5 aa, Homo sapiens
PIENL

SEQ ID NO: 7291 - protein, 5 aa, Homo sapiens
GKVWV

SEQ ID NO: 7292 - protein, 5 aa, Homo sapiens
PRSLR

SEQ ID NO: 7293 - protein, 5 aa, Homo sapiens
SGESL

SEQ ID NO: 7294 - protein, 5 aa, Homo sapiens
LAAMD

SEQ ID NO: 7295 - protein, 5 aa, Homo sapiens
CSPAN

SEQ ID NO: 7296 - protein, 5 aa, Homo sapiens
KFKHL

SEQ ID NO: 7297 - protein, 5 aa, Homo sapiens
HFSGR

SEQ ID NO: 7298 - protein, 5 aa, Homo sapiens
QGQSS

SEQ ID NO: 7299 - protein, 5 aa, Homo sapiens
QRVSS

SEQ ID NO: 7300 - protein, 5 aa, Homo sapiens
LTKAS

SEQ ID NO: 7301 - protein, 5 aa, Homo sapiens
TFTST

SEQ ID NO: 7302 - protein, 5 aa, Homo sapiens
ERVVS

SEQ ID NO: 7303 - protein, 5 aa, Homo sapiens
QSLMD

SEQ ID NO: 7304 - protein, 5 aa, Homo sapiens
YQSEA

SEQ ID NO: 7305 - protein, 5 aa, Homo sapiens
IFRKN

SEQ ID NO: 7306 - protein, 5 aa, Homo sapiens
LENAY

SEQ ID NO: 7307 - protein, 5 aa, Homo sapiens
LGIRW

SEQ ID NO: 7308 - protein, 5 aa, Homo sapiens
LITAC

SEQ ID NO: 7309 - protein, 5 aa, Homo sapiens
SHRSV

SEQ ID NO: 7310 - protein, 5 aa, Homo sapiens
GFLLQ

SEQ ID NO: 7311 - protein, 5 aa, Homo sapiens
QPRKR

SEQ ID NO: 7312 - protein, 5 aa, Homo sapiens
RPAEA

SEQ ID NO: 7313 - protein, 5 aa, Homo sapiens
RCRRT

SEQ ID NO: 7314 - protein, 5 aa, Homo sapiens
RNMCN

SEQ ID NO: 7315 - protein, 5 aa, Homo sapiens
LHLRS

SEQ ID NO: 7316 - protein, 5 aa, Homo sapiens
QTVIV

SEQ ID NO: 7317 - protein, 5 aa, Homo sapiens
KEEKG

SEQ ID NO: 7318 - protein, 5 aa, Homo sapiens
NSTYA

SEQ ID NO: 7319 - protein, 5 aa, Homo sapiens
RGSRM

SEQ ID NO: 7320 - protein, 5 aa, Homo sapiens
SSRSP

SEQ ID NO: 7321 - protein, 5 aa, Homo sapiens
IKNTT

SEQ ID NO: 7322 - protein, 5 aa, Homo sapiens
CTVEM

SEQ ID NO: 7323 - protein, 5 aa, Homo sapiens
FEKPR

SEQ ID NO: 7324 - protein, 5 aa, Homo sapiens
LTRIH

SEQ ID NO: 7325 - protein, 5 aa, Homo sapiens
AWPGY

SEQ ID NO: 7326 - protein, 5 aa, Homo sapiens
ITDLP

SEQ ID NO: 7327 - protein, 5 aa, Homo sapiens
TCSSS

SEQ ID NO: 7328 - protein, 5 aa, Homo sapiens
YQGYR

SEQ ID NO: 7329 - protein, 5 aa, Homo sapiens
LGLVS

SEQ ID NO: 7330 - protein, 5 aa, Homo sapiens
KPITA

SEQ ID NO: 7331 - protein, 5 aa, Homo sapiens
KQRKY

SEQ ID NO: 7332 - protein, 5 aa, Homo sapiens
RSLRP

SEQ ID NO: 7333 - protein, 5 aa, Homo sapiens
AVDSD

SEQ ID NO: 7334 - protein, 5 aa, Homo sapiens
QAVGH

SEQ ID NO: 7335 - protein, 5 aa, Homo sapiens
TSEAS

SEQ ID NO: 7336 - protein, 5 aa, Homo sapiens
PQRRR

SEQ ID NO: 7337 - protein, 5 aa, Homo sapiens
PGSPA

SEQ ID NO: 7338 - protein, 5 aa, Homo sapiens
SQLPP

SEQ ID NO: 7339 - protein, 5 aa, Homo sapiens
AQVHF

SEQ ID NO: 7340 - protein, 5 aa, Homo sapiens
ESTSL

SEQ ID NO: 7341 - protein, 5 aa, Homo sapiens
ASLGF

SEQ ID NO: 7342 - protein, 5 aa, Homo sapiens
SQSFY

SEQ ID NO: 7343 - protein, 5 aa, Homo sapiens
LETDV

SEQ ID NO: 7344 - protein, 5 aa, Homo sapiens
QNGNV

SEQ ID NO: 7345 - protein, 5 aa, Homo sapiens
ASASW

SEQ ID NO: 7346 - protein, 5 aa, Homo sapiens
VQTHF

SEQ ID NO: 7347 - protein, 5 aa, Homo sapiens
KLSGN

SEQ ID NO: 7348 - protein, 5 aa, Homo sapiens
SYSVS

SEQ ID NO: 7349 - protein, 5 aa, Homo sapiens
EELDG

SEQ ID NO: 7350 - protein, 5 aa, Homo sapiens
LALAL

SEQ ID NO: 7351 - protein, 5 aa, Homo sapiens
PRPSV

SEQ ID NO: 7352 - protein, 5 aa, Homo sapiens
ETGQM

SEQ ID NO: 7353 - protein, 5 aa, Homo sapiens
YGQGD

SEQ ID NO: 7354 - protein, 5 aa, Homo sapiens
SAVMY

SEQ ID NO: 7355 - protein, 5 aa, Homo sapiens
NSLKN

SEQ ID NO: 7356 - protein, 5 aa, Homo sapiens
VRITG

SEQ ID NO: 7357 - protein, 5 aa, Homo sapiens
NSGCC

SEQ ID NO: 7358 - protein, 5 aa, Homo sapiens
DMVEQ

SEQ ID NO: 7359 - protein, 5 aa, Homo sapiens
QTGLS

SEQ ID NO: 7360 - protein, 5 aa, Homo sapiens
LWFRR

SEQ ID NO: 7361 - protein, 5 aa, Homo sapiens
LDSIL

SEQ ID NO: 7362 - protein, 5 aa, Homo sapiens
KCSVW

SEQ ID NO: 7363 - protein, 5 aa, Homo sapiens
RKTME

SEQ ID NO: 7364 - protein, 5 aa, Homo sapiens
CRRLT

SEQ ID NO: 7365 - protein, 5 aa, Homo sapiens
NSTTV

SEQ ID NO: 7366 - protein, 5 aa, Homo sapiens
SYVQI

SEQ ID NO: 7367 - protein, 5 aa, Homo sapiens
VTDLY

SEQ ID NO: 7368 - protein, 5 aa, Homo sapiens
MDTGR

SEQ ID NO: 7369 - protein, 5 aa, Homo sapiens
MTDDK

SEQ ID NO: 7370 - protein, 5 aa, Homo sapiens
PAGRN

SEQ ID NO: 7371 - protein, 5 aa, Homo sapiens
QQQFV

SEQ ID NO: 7372 - protein, 5 aa, Homo sapiens
HYVTS

SEQ ID NO: 7373 - protein, 5 aa, Homo sapiens
TEGSD

SEQ ID NO: 7374 - protein, 5 aa, Homo sapiens
SDSES

SEQ ID NO: 7375 - protein, 5 aa, Homo sapiens
PLRVG

SEQ ID NO: 7376 - protein, 5 aa, Homo sapiens
RRKSV

SEQ ID NO: 7377 - protein, 5 aa, Homo sapiens
SSLKQ

SEQ ID NO: 7378 - protein, 5 aa, Homo sapiens
HVLDV

SEQ ID NO: 7379 - protein, 5 aa, Homo sapiens
YRISA

SEQ ID NO: 7380 - protein, 5 aa, Homo sapiens
ALRKF

SEQ ID NO: 7381 - protein, 5 aa, Homo sapiens
MTDVE

SEQ ID NO: 7382 - protein, 5 aa, Homo sapiens
ELQLL

SEQ ID NO: 7383 - protein, 5 aa, Homo sapiens
SDEAS

SEQ ID NO: 7384 - protein, 5 aa, Homo sapiens
WKVEL

SEQ ID NO: 7385 - protein, 5 aa, Homo sapiens
RGAPW

SEQ ID NO: 7386 - protein, 5 aa, Homo sapiens
PTPKP

SEQ ID NO: 7387 - protein, 5 aa, Homo sapiens
TDVAT

SEQ ID NO: 7388 - protein, 5 aa, Homo sapiens
EQARP

SEQ ID NO: 7389 - protein, 5 aa, Homo sapiens
AFEAD

SEQ ID NO: 7390 - protein, 5 aa, Homo sapiens
YSEYC

SEQ ID NO: 7391 - protein, 5 aa, Homo sapiens
ASELL

SEQ ID NO: 7392 - protein, 5 aa, Homo sapiens
EEPGT

SEQ ID NO: 7393 - protein, 5 aa, Homo sapiens
ESLGQ

SEQ ID NO: 7394 - protein, 5 aa, Homo sapiens
VDLSA

SEQ ID NO: 7395 - protein, 5 aa, Homo sapiens
EEDDK

SEQ ID NO: 7396 - protein, 5 aa, Homo sapiens
LFSEK

SEQ ID NO: 7397 - protein, 5 aa, Homo sapiens
VHEED

SEQ ID NO: 7398 - protein, 5 aa, Homo sapiens
FMFLC

SEQ ID NO: 7399 - protein, 5 aa, Homo sapiens
LDTTI

SEQ ID NO: 7400 - protein, 5 aa, Homo sapiens
VGSDA

SEQ ID NO: 7401 - protein, 5 aa, Homo sapiens
DWWER

SEQ ID NO: 7402 - protein, 5 aa, Homo sapiens
IQRRD

SEQ ID NO: 7403 - protein, 5 aa, Homo sapiens
AQGTL

SEQ ID NO: 7404 - protein, 5 aa, Homo sapiens
PTQEH

SEQ ID NO: 7405 - protein, 5 aa, Homo sapiens
NKLKL

SEQ ID NO: 7406 - protein, 5 aa, Homo sapiens
KETYY

SEQ ID NO: 7407 - protein, 5 aa, Homo sapiens
TEQVE

SEQ ID NO: 7408 - protein, 5 aa, Homo sapiens
QRKNM

SEQ ID NO: 7409 - protein, 5 aa, Homo sapiens
TPSEV

SEQ ID NO: 7410 - protein, 5 aa, Homo sapiens
VSMST

SEQ ID NO: 7411 - protein, 5 aa, Homo sapiens
TFLIP

SEQ ID NO: 7412 - protein, 5 aa, Homo sapiens
KGAKL

SEQ ID NO: 7413 - protein, 5 aa, Homo sapiens
KVHTR

SEQ ID NO: 7414 - protein, 5 aa, Homo sapiens
PASSP

SEQ ID NO: 7415 - protein, 5 aa, Homo sapiens
MAHIR

SEQ ID NO: 7416 - protein, 5 aa, Homo sapiens
AIVEP

SEQ ID NO: 7417 - protein, 5 aa, Homo sapiens
QVVGS

SEQ ID NO: 7418 - protein, 5 aa, Homo sapiens
HAAGV

SEQ ID NO: 7419 - protein, 5 aa, Homo sapiens
WLKKL

SEQ ID NO: 7420 - protein, 5 aa, Homo sapiens
MEDGM

SEQ ID NO: 7421 - protein, 5 aa, Homo sapiens
TGFLS

SEQ ID NO: 7422 - protein, 5 aa, Homo sapiens
WWYHS

SEQ ID NO: 7423 - protein, 5 aa, Homo sapiens
KRSRK

SEQ ID NO: 7424 - protein, 5 aa, Homo sapiens
FWGKT

SEQ ID NO: 7425 - protein, 5 aa, Homo sapiens
FRWFQ

SEQ ID NO: 7426 - protein, 5 aa, Homo sapiens
DLTTL

SEQ ID NO: 7427 - protein, 5 aa, Homo sapiens
NYISS

SEQ ID NO: 7428 - protein, 5 aa, Homo sapiens
QGRSL

SEQ ID NO: 7429 - protein, 5 aa, Homo sapiens
LFSRK

SEQ ID NO: 7430 - protein, 5 aa, Homo sapiens
KKFSM

SEQ ID NO: 7431 - protein, 5 aa, Homo sapiens
EAVAH

SEQ ID NO: 7432 - protein, 5 aa, Homo sapiens
AKWIP

SEQ ID NO: 7433 - protein, 5 aa, Homo sapiens
ALPPV

SEQ ID NO: 7434 - protein, 5 aa, Homo sapiens
KWFWN

SEQ ID NO: 7435 - protein, 5 aa, Homo sapiens
SCTSK

SEQ ID NO: 7436 - protein, 5 aa, Homo sapiens
VSLSM

SEQ ID NO: 7437 - protein, 5 aa, Homo sapiens
PKKKL

SEQ ID NO: 7438 - protein, 5 aa, Homo sapiens
VAKSQ

SEQ ID NO: 7439 - protein, 5 aa, Homo sapiens
VERID

SEQ ID NO: 7440 - protein, 5 aa, Homo sapiens
NRTLS

SEQ ID NO: 7441 - protein, 5 aa, Homo sapiens
TCTKA

SEQ ID NO: 7442 - protein, 5 aa, Homo sapiens
GKKSQ

SEQ ID NO: 7443 - protein, 5 aa, Homo sapiens
DSDSN

SEQ ID NO: 7444 - protein, 5 aa, Homo sapiens
SANKS

SEQ ID NO: 7445 - protein, 5 aa, Homo sapiens
ECACV

SEQ ID NO: 7446 - protein, 5 aa, Homo sapiens
KGFQQ

SEQ ID NO: 7447 - protein, 5 aa, Homo sapiens
GWSGS

SEQ ID NO: 7448 - protein, 5 aa, Homo sapiens
GGKFS

SEQ ID NO: 7449 - protein, 5 aa, Homo sapiens
RSYTR

SEQ ID NO: 7450 - protein, 5 aa, Homo sapiens
GKKGK

SEQ ID NO: 7451 - protein, 5 aa, Homo sapiens
LFVTV

SEQ ID NO: 7452 - protein, 5 aa, Homo sapiens
QVVTD

SEQ ID NO: 7453 - protein, 5 aa, Homo sapiens
DPALA

SEQ ID NO: 7454 - protein, 5 aa, Homo sapiens
CCNTS

SEQ ID NO: 7455 - protein, 5 aa, Homo sapiens
ELQAK

SEQ ID NO: 7456 - protein, 5 aa, Homo sapiens
MTTSF

SEQ ID NO: 7457 - protein, 5 aa, Homo sapiens
PHSKK

SEQ ID NO: 7458 - protein, 5 aa, Homo sapiens
LSALC

SEQ ID NO: 7459 - protein, 5 aa, Homo sapiens
NSLFT

SEQ ID NO: 7460 - protein, 5 aa, Homo sapiens
KQLYK

SEQ ID NO: 7461 - protein, 5 aa, Homo sapiens
IQRRD

SEQ ID NO: 7462 - protein, 5 aa, Homo sapiens
GGRGL

SEQ ID NO: 7463 - protein, 5 aa, Homo sapiens
RKRKQ

SEQ ID NO: 7464 - protein, 5 aa, Homo sapiens
AAGEA

SEQ ID NO: 7465 - protein, 5 aa, Homo sapiens
AQGPK

SEQ ID NO: 7466 - protein, 5 aa, Homo sapiens
SARAG

SEQ ID NO: 7467 - protein, 5 aa, Homo sapiens
GTVKL

SEQ ID NO: 7468 - protein, 5 aa, Homo sapiens
KPQLN

SEQ ID NO: 7469 - protein, 5 aa, Homo sapiens
GRKEH

SEQ ID NO: 7470 - protein, 5 aa, Homo sapiens
KVDSV

SEQ ID NO: 7471 - protein, 5 aa, Homo sapiens
NLLEI

SEQ ID NO: 7472 - protein, 5 aa, Homo sapiens
SMSFT

SEQ ID NO: 7473 - protein, 5 aa, Homo sapiens
KVYIM

SEQ ID NO: 7474 - protein, 5 aa, Homo sapiens
EVGPD

SEQ ID NO: 7475 - protein, 5 aa, Homo sapiens
DKEQS

SEQ ID NO: 7476 - protein, 5 aa, Homo sapiens
LRRGG

SEQ ID NO: 7477 - protein, 5 aa, Homo sapiens
SEKCI

SEQ ID NO: 7478 - protein, 5 aa, Homo sapiens
VCTKV

SEQ ID NO: 7479 - protein, 5 aa, Homo sapiens
SKDSS

SEQ ID NO: 7480 - protein, 5 aa, Homo sapiens
KICGP

SEQ ID NO: 7481 - protein, 5 aa, Homo sapiens
IPSFH

SEQ ID NO: 7482 - protein, 5 aa, Homo sapiens
DVTFL

SEQ ID NO: 7483 - protein, 5 aa, Homo sapiens
EGDAI

SEQ ID NO: 7484 - protein, 5 aa, Homo sapiens
NEAGD

SEQ ID NO: 7485 - protein, 5 aa, Homo sapiens
NSVKI

SEQ ID NO: 7486 - protein, 5 aa, Homo sapiens
EQILK

SEQ ID NO: 7487 - protein, 5 aa, Homo sapiens
DEEED

SEQ ID NO: 7488 - protein, 5 aa, Homo sapiens
AQMAS

SEQ ID NO: 7489 - protein, 5 aa, Homo sapiens
FLQIS

SEQ ID NO: 7490 - protein, 5 aa, Homo sapiens
GRAHP

SEQ ID NO: 7491 - protein, 5 aa, Homo sapiens
PGYPV

SEQ ID NO: 7492 - protein, 5 aa, Homo sapiens
LKSLP

SEQ ID NO: 7493 - protein, 5 aa, Homo sapiens
APAGP

SEQ ID NO: 7494 - protein, 5 aa, Homo sapiens
AAGDS

SEQ ID NO: 7495 - protein, 5 aa, Homo sapiens
QNPCE

SEQ ID NO: 7496 - protein, 5 aa, Homo sapiens
IMPAN

SEQ ID NO: 7497 - protein, 5 aa, Homo sapiens
TEDLS

SEQ ID NO: 7498 - protein, 5 aa, Homo sapiens
EMDID

SEQ ID NO: 7499 - protein, 5 aa, Homo sapiens
ETSHM

SEQ ID NO: 7500 - protein, 5 aa, Homo sapiens
SDVEI

SEQ ID NO: 7501 - protein, 5 aa, Homo sapiens
QRWCP

SEQ ID NO: 7502 - protein, 5 aa, Homo sapiens
QEKSV

SEQ ID NO: 7503 - protein, 5 aa, Homo sapiens
HTSPS

SEQ ID NO: 7504 - protein, 5 aa, Homo sapiens
SPKSK

SEQ ID NO: 7505 - protein, 5 aa, Homo sapiens
VIGRL

SEQ ID NO: 7506 - protein, 5 aa, Homo sapiens
RSQIV

SEQ ID NO: 7507 - protein, 5 aa, Homo sapiens
VRDTM

SEQ ID NO: 7508 - protein, 5 aa, Homo sapiens
KKGAS

SEQ ID NO: 7509 - protein, 5 aa, Homo sapiens
EIADW

SEQ ID NO: 7510 - protein, 5 aa, Homo sapiens
SNASN

SEQ ID NO: 7511 - protein, 5 aa, Homo sapiens
RQPQV

SEQ ID NO: 7512 - protein, 5 aa, Homo sapiens
EKCDR

SEQ ID NO: 7513 - protein, 5 aa, Homo sapiens
SHEQH

SEQ ID NO: 7514 - protein, 5 aa, Homo sapiens
RQKFL

SEQ ID NO: 7515 - protein, 5 aa, Homo sapiens
IGIKL

SEQ ID NO: 7516 - protein, 5 aa, Homo sapiens
DHKHR

SEQ ID NO: 7517 - protein, 5 aa, Homo sapiens
KKVFS

SEQ ID NO: 7518 - protein, 5 aa, Homo sapiens
MNGDF

SEQ ID NO: 7519 - protein, 5 aa, Homo sapiens
WKHIL

SEQ ID NO: 7520 - protein, 5 aa, Homo sapiens
MPFIQ

SEQ ID NO: 7521 - protein, 5 aa, Homo sapiens
PERSD

SEQ ID NO: 7522 - protein, 5 aa, Homo sapiens
KKLIE

SEQ ID NO: 7523 - protein, 5 aa, Homo sapiens
KKLKY

SEQ ID NO: 7524 - protein, 5 aa, Homo sapiens
THPWE

SEQ ID NO: 7525 - protein, 5 aa, Homo sapiens
KGIGL

SEQ ID NO: 7526 - protein, 5 aa, Homo sapiens
VKVDP

SEQ ID NO: 7527 - protein, 5 aa, Homo sapiens
NVKGP

SEQ ID NO: 7528 - protein, 5 aa, Homo sapiens
QEDQL

SEQ ID NO: 7529 - protein, 5 aa, Homo sapiens
ECYGF

SEQ ID NO: 7530 - protein, 5 aa, Homo sapiens
MIYKN

SEQ ID NO: 7531 - protein, 5 aa, Homo sapiens
VEESH

SEQ ID NO: 7532 - protein, 5 aa, Homo sapiens
QRWCP

SEQ ID NO: 7533 - protein, 5 aa, Homo sapiens
NIQLF

SEQ ID NO: 7534 - protein, 5 aa, Homo sapiens
KRKRF

SEQ ID NO: 7535 - protein, 5 aa, Homo sapiens
SKITL

SEQ ID NO: 7536 - protein, 5 aa, Homo sapiens
ITSSS

SEQ ID NO: 7537 - protein, 5 aa, Homo sapiens
QARGV

SEQ ID NO: 7538 - protein, 5 aa, Homo sapiens
CKFKN

SEQ ID NO: 7539 - protein, 5 aa, Homo sapiens
SQELQ

SEQ ID NO: 7540 - protein, 5 aa, Homo sapiens
HTLDS

SEQ ID NO: 7541 - protein, 5 aa, Homo sapiens
LKMLI

SEQ ID NO: 7542 - protein, 5 aa, Homo sapiens
YLNAS

SEQ ID NO: 7543 - protein, 5 aa, Homo sapiens
YSEYV

SEQ ID NO: 7544 - protein, 5 aa, Homo sapiens
SSPQT

SEQ ID NO: 7545 - protein, 5 aa, Homo sapiens
KFAES

SEQ ID NO: 7546 - protein, 5 aa, Homo sapiens
FVSTF

SEQ ID NO: 7547 - protein, 5 aa, Homo sapiens
LNSYS

SEQ ID NO: 7548 - protein, 5 aa, Homo sapiens
EIDMA

SEQ ID NO: 7549 - protein, 5 aa, Homo sapiens
LQPLF

SEQ ID NO: 7550 - protein, 5 aa, Homo sapiens
KRGCD

SEQ ID NO: 7551 - protein, 5 aa, Homo sapiens
LDRII

SEQ ID NO: 7552 - protein, 5 aa, Homo sapiens
VVSGK

SEQ ID NO: 7553 - protein, 5 aa, Homo sapiens
AWISP

SEQ ID NO: 7554 - protein, 5 aa, Homo sapiens
VHEED

SEQ ID NO: 7555 - protein, 5 aa, Homo sapiens
KGHAF

SEQ ID NO: 7556 - protein, 5 aa, Homo sapiens
PITAG

SEQ ID NO: 7557 - protein, 5 aa, Homo sapiens
VDEYS

SEQ ID NO: 7558 - protein, 5 aa, Homo sapiens
SSPQT

SEQ ID NO: 7559 - protein, 5 aa, Homo sapiens
GFWAC

SEQ ID NO: 7560 - protein, 5 aa, Homo sapiens
NKRFY

SEQ ID NO: 7561 - protein, 5 aa, Homo sapiens
KAKGK

SEQ ID NO: 7562 - protein, 5 aa, Homo sapiens
PVGTK

SEQ ID NO: 7563 - protein, 5 aa, Homo sapiens
KTSKK

SEQ ID NO: 7564 - protein, 5 aa, Homo sapiens
YTSSK

SEQ ID NO: 7565 - protein, 5 aa, Homo sapiens
TNVQQ

SEQ ID NO: 7566 - protein, 5 aa, Homo sapiens
MESSL

SEQ ID NO: 7567 - protein, 5 aa, Homo sapiens
GRLVF

SEQ ID NO: 7568 - protein, 5 aa, Homo sapiens
TSVRK

SEQ ID NO: 7569 - protein, 5 aa, Homo sapiens
EPLEE

SEQ ID NO: 7570 - protein, 5 aa, Homo sapiens
QGCLF

SEQ ID NO: 7571 - protein, 5 aa, Homo sapiens
QYLGS

SEQ ID NO: 7572 - protein, 5 aa, Homo sapiens
FKKVT

SEQ ID NO: 7573 - protein, 5 aa, Homo sapiens
REDEG

SEQ ID NO: 7574 - protein, 5 aa, Homo sapiens
SDVDS

SEQ ID NO: 7575 - protein, 5 aa, Homo sapiens
RRQRP

SEQ ID NO: 7576 - protein, 5 aa, Homo sapiens
ASLLK

SEQ ID NO: 7577 - protein, 5 aa, Homo sapiens
SNSKK

SEQ ID NO: 7578 - protein, 5 aa, Homo sapiens
LQKIK

SEQ ID NO: 7579 - protein, 5 aa, Homo sapiens
FSTEV

SEQ ID NO: 7580 - protein, 5 aa, Homo sapiens
MLGCS

SEQ ID NO: 7581 - protein, 5 aa, Homo sapiens
KFAAC

SEQ ID NO: 7582 - protein, 5 aa, Homo sapiens
GSALA

SEQ ID NO: 7583 - protein, 5 aa, Homo sapiens
SSPQS

SEQ ID NO: 7584 - protein, 5 aa, Homo sapiens
SNVLS

SEQ ID NO: 7585 - protein, 5 aa, Homo sapiens
LQLIL

SEQ ID NO: 7586 - protein, 5 aa, Homo sapiens
CCKKP

SEQ ID NO: 7587 - protein, 5 aa, Homo sapiens
KAKGK

SEQ ID NO: 7588 - protein, 5 aa, Homo sapiens
MQSYG

SEQ ID NO: 7589 - protein, 5 aa, Homo sapiens
PDRQR

SEQ ID NO: 7590 - protein, 5 aa, Homo sapiens
AYNGM

SEQ ID NO: 7591 - protein, 5 aa, Homo sapiens
AVESQ

SEQ ID NO: 7592 - protein, 5 aa, Homo sapiens
QVSEE

SEQ ID NO: 7593 - protein, 5 aa, Homo sapiens
DCHAL

SEQ ID NO: 7594 - protein, 5 aa, Homo sapiens
ALALY

SEQ ID NO: 7595 - protein, 5 aa, Homo sapiens
KFTKS

SEQ ID NO: 7596 - protein, 5 aa, Homo sapiens
DDETF

SEQ ID NO: 7597 - protein, 5 aa, Homo sapiens
RPPRP

SEQ ID NO: 7598 - protein, 5 aa, Homo sapiens
HPNYN

SEQ ID NO: 7599 - protein, 5 aa, Homo sapiens
VGPLC

SEQ ID NO: 7600 - protein, 5 aa, Homo sapiens
KESVM

SEQ ID NO: 7601 - protein, 5 aa, Homo sapiens
QDAYF

SEQ ID NO: 7602 - protein, 5 aa, Homo sapiens
SSEYV

SEQ ID NO: 7603 - protein, 5 aa, Homo sapiens
DDGLP

SEQ ID NO: 7604 - protein, 5 aa, Homo sapiens
LNSTF

SEQ ID NO: 7605 - protein, 5 aa, Homo sapiens
TRPPD

SEQ ID NO: 7606 - protein, 5 aa, Homo sapiens
PETRT

SEQ ID NO: 7607 - protein, 5 aa, Homo sapiens
RLKKL

SEQ ID NO: 7608 - protein, 5 aa, Homo sapiens
KRYAT

SEQ ID NO: 7609 - protein, 5 aa, Homo sapiens
DSSRY

SEQ ID NO: 7610 - protein, 5 aa, Homo sapiens
LRTSV

SEQ ID NO: 7611 - protein, 5 aa, Homo sapiens
SKDFA

SEQ ID NO: 7612 - protein, 5 aa, Homo sapiens
VHEED

SEQ ID NO: 7613 - protein, 5 aa, Homo sapiens
KHLRC

SEQ ID NO: 7614 - protein, 5 aa, Homo sapiens
HFIDR

SEQ ID NO: 7615 - protein, 5 aa, Homo sapiens
AKMFA

SEQ ID NO: 7616 - protein, 5 aa, Homo sapiens
PEVVM

SEQ ID NO: 7617 - protein, 5 aa, Homo sapiens
CIRLK

SEQ ID NO: 7618 - protein, 5 aa, Homo sapiens
QLGGL

SEQ ID NO: 7619 - protein, 5 aa, Homo sapiens
LDLGS

SEQ ID NO: 7620 - protein, 5 aa, Homo sapiens
PQELL

SEQ ID NO: 7621 - protein, 5 aa, Homo sapiens
APEQQ

SEQ ID NO: 7622 - protein, 5 aa, Homo sapiens
TGSLD

SEQ ID NO: 7623 - protein, 5 aa, Homo sapiens
EAKSD

SEQ ID NO: 7624 - protein, 5 aa, Homo sapiens
EVQPH

SEQ ID NO: 7625 - protein, 5 aa, Homo sapiens
DSPIK

SEQ ID NO: 7626 - protein, 5 aa, Homo sapiens
KCHNT

SEQ ID NO: 7627 - protein, 5 aa, Homo sapiens
FRFLE

SEQ ID NO: 7628 - protein, 5 aa, Homo sapiens
RSNPS

SEQ ID NO: 7629 - protein, 5 aa, Homo sapiens
FMTLG

SEQ ID NO: 7630 - protein, 5 aa, Homo sapiens
GSAEI

SEQ ID NO: 7631 - protein, 5 aa, Homo sapiens
PGRGS

SEQ ID NO: 7632 - protein, 5 aa, Homo sapiens
LRRTR

SEQ ID NO: 7633 - protein, 5 aa, Homo sapiens
RNCIP

SEQ ID NO: 7634 - protein, 5 aa, Homo sapiens
RKLFP

SEQ ID NO: 7635 - protein, 5 aa, Homo sapiens
RRHRD

SEQ ID NO: 7636 - protein, 5 aa, Homo sapiens
MSVIP

SEQ ID NO: 7637 - protein, 5 aa, Homo sapiens
VPETL

SEQ ID NO: 7638 - protein, 5 aa, Homo sapiens
RDTWE

SEQ ID NO: 7639 - protein, 5 aa, Homo sapiens
FSTDV

SEQ ID NO: 7640 - protein, 5 aa, Homo sapiens
MSVTI

SEQ ID NO: 7641 - protein, 5 aa, Homo sapiens
LKHSS

SEQ ID NO: 7642 - protein, 5 aa, Homo sapiens
HWCFC

SEQ ID NO: 7643 - protein, 5 aa, Homo sapiens
SRTHL

SEQ ID NO: 7644 - protein, 5 aa, Homo sapiens
FIPIN

SEQ ID NO: 7645 - protein, 5 aa, Homo sapiens
TEALD

SEQ ID NO: 7646 - protein, 5 aa, Homo sapiens
VRADK

SEQ ID NO: 7647 - protein, 5 aa, Homo sapiens
ILAAN

SEQ ID NO: 7648 - protein, 5 aa, Homo sapiens
LELQT

SEQ ID NO: 7649 - protein, 5 aa, Homo sapiens
IDIPE

SEQ ID NO: 7650 - protein, 5 aa, Homo sapiens
FRSSR

SEQ ID NO: 7651 - protein, 5 aa, Homo sapiens
AYRSL

SEQ ID NO: 7652 - protein, 5 aa, Homo sapiens
EGKEL

SEQ ID NO: 7653 - protein, 5 aa, Homo sapiens
AKKLE

SEQ ID NO: 7654 - protein, 5 aa, Homo sapiens
ANMGF

SEQ ID NO: 7655 - protein, 5 aa, Homo sapiens
MQVYE

SEQ ID NO: 7656 - protein, 5 aa, Homo sapiens
LLNAS

SEQ ID NO: 7657 - protein, 5 aa, Homo sapiens
QTTIA

SEQ ID NO: 7658 - protein, 5 aa, Homo sapiens
KLLKE

SEQ ID NO: 7659 - protein, 5 aa, Homo sapiens
KQFHE

SEQ ID NO: 7660 - protein, 5 aa, Homo sapiens
IRRMN

SEQ ID NO: 7661 - protein, 5 aa, Homo sapiens
FCEKM

SEQ ID NO: 7662 - protein, 5 aa, Homo sapiens
NDDTD

SEQ ID NO: 7663 - protein, 5 aa, Homo sapiens
SFKTM

SEQ ID NO: 7664 - protein, 5 aa, Homo sapiens
WAICP

SEQ ID NO: 7665 - protein, 5 aa, Homo sapiens
RTDSS

SEQ ID NO: 7666 - protein, 5 aa, Homo sapiens
MRKRM

SEQ ID NO: 7667 - protein, 5 aa, Homo sapiens
FLETK

SEQ ID NO: 7668 - protein, 5 aa, Homo sapiens
IHKNK

SEQ ID NO: 7669 - protein, 5 aa, Homo sapiens
TSANL

SEQ ID NO: 7670 - protein, 5 aa, Homo sapiens
RGLFF

SEQ ID NO: 7671 - protein, 5 aa, Homo sapiens
LIPIN

SEQ ID NO: 7672 - protein, 5 aa, Homo sapiens
VKSER

SEQ ID NO: 7673 - protein, 5 aa, Homo sapiens
TEFLN

SEQ ID NO: 7674 - protein, 5 aa, Homo sapiens
AMENM

SEQ ID NO: 7675 - protein, 5 aa, Homo sapiens
GRSRY

SEQ ID NO: 7676 - protein, 5 aa, Homo sapiens
TGSAF

SEQ ID NO: 7677 - protein, 5 aa, Homo sapiens
CIDVR

SEQ ID NO: 7678 - protein, 5 aa, Homo sapiens
VRLFT

SEQ ID NO: 7679 - protein, 5 aa, Homo sapiens
VDRPV

SEQ ID NO: 7680 - protein, 5 aa, Homo sapiens
NGNAQ

SEQ ID NO: 7681 - protein, 5 aa, Homo sapiens
IINKN

SEQ ID NO: 7682 - protein, 5 aa, Homo sapiens
LGAEV

SEQ ID NO: 7683 - protein, 5 aa, Homo sapiens
RPEKR

SEQ ID NO: 7684 - protein, 5 aa, Homo sapiens
FNNPT

SEQ ID NO: 7685 - protein, 5 aa, Homo sapiens
QYPYM

SEQ ID NO: 7686 - protein, 5 aa, Homo sapiens
HWPPG

SEQ ID NO: 7687 - protein, 5 aa, Homo sapiens
ARGFA

SEQ ID NO: 7688 - protein, 5 aa, Homo sapiens
MNLDR

SEQ ID NO: 7689 - protein, 5 aa, Homo sapiens
SILFN

SEQ ID NO: 7690 - protein, 5 aa, Homo sapiens
KCTVF

SEQ ID NO: 7691 - protein, 5 aa, Homo sapiens
EGTEV

SEQ ID NO: 7692 - protein, 5 aa, Homo sapiens
PDPFP

SEQ ID NO: 7693 - protein, 5 aa, Homo sapiens
SASRS

SEQ ID NO: 7694 - protein, 5 aa, Homo sapiens
NDKKT

SEQ ID NO: 7695 - protein, 5 aa, Homo sapiens
CKFTD

SEQ ID NO: 7696 - protein, 5 aa, Homo sapiens
EEVKS

SEQ ID NO: 7697 - protein, 5 aa, Homo sapiens
DDAED

SEQ ID NO: 7698 - protein, 5 aa, Homo sapiens
LTVTP

SEQ ID NO: 7699 - protein, 5 aa, Homo sapiens
LQRAA

SEQ ID NO: 7700 - protein, 5 aa, Homo sapiens
EDLYA

SEQ ID NO: 7701 - protein, 5 aa, Homo sapiens
RVTPK

SEQ ID NO: 7702 - protein, 5 aa, Homo sapiens
SGSIR

SEQ ID NO: 7703 - protein, 5 aa, Homo sapiens
VGPAL

SEQ ID NO: 7704 - protein, 5 aa, Homo sapiens
GSDND

SEQ ID NO: 7705 - protein, 5 aa, Homo sapiens
IKLWD

SEQ ID NO: 7706 - protein, 5 aa, Homo sapiens
SCCHH

SEQ ID NO: 7707 - protein, 5 aa, Homo sapiens
TCCVL

SEQ ID NO: 7708 - protein, 5 aa, Homo sapiens
PVCFL

SEQ ID NO: 7709 - protein, 5 aa, Homo sapiens
RQSQH

SEQ ID NO: 7710 - protein, 5 aa, Homo sapiens
SMFQL

SEQ ID NO: 7711 - protein, 5 aa, Homo sapiens
QRKFP

SEQ ID NO: 7712 - protein, 5 aa, Homo sapiens
LISAL

SEQ ID NO: 7713 - protein, 5 aa, Homo sapiens
SEDKP

SEQ ID NO: 7714 - protein, 5 aa, Homo sapiens
AFAEV

SEQ ID NO: 7715 - protein, 5 aa, Homo sapiens
QAGAA

SEQ ID NO: 7716 - protein, 5 aa, Homo sapiens
EPQVC

SEQ ID NO: 7717 - protein, 5 aa, Homo sapiens
RRRWT

SEQ ID NO: 7718 - protein, 5 aa, Homo sapiens
CKLAS

SEQ ID NO: 7719 - protein, 5 aa, Homo sapiens
LGVGL

SEQ ID NO: 7720 - protein, 5 aa, Homo sapiens
VDLGS

SEQ ID NO: 7721 - protein, 5 aa, Homo sapiens
KGKRD

SEQ ID NO: 7722 - protein, 5 aa, Homo sapiens
LAWNC

SEQ ID NO: 7723 - protein, 5 aa, Homo sapiens
RRLQD

SEQ ID NO: 7724 - protein, 5 aa, Homo sapiens
GRYFC

SEQ ID NO: 7725 - protein, 5 aa, Homo sapiens
SRRCC

SEQ ID NO: 7726 - protein, 5 aa, Homo sapiens
RLLNK

SEQ ID NO: 7727 - protein, 5 aa, Homo sapiens
KWRET

SEQ ID NO: 7728 - protein, 5 aa, Homo sapiens
RTRVP

SEQ ID NO: 7729 - protein, 5 aa, Homo sapiens
SVREG

SEQ ID NO: 7730 - protein, 5 aa, Homo sapiens
LKWTV

SEQ ID NO: 7731 - protein, 5 aa, Homo sapiens
RPWLR

SEQ ID NO: 7732 - protein, 5 aa, Homo sapiens
AEKRQ

SEQ ID NO: 7733 - protein, 5 aa, Homo sapiens
LLGGH

SEQ ID NO: 7734 - protein, 5 aa, Homo sapiens
FKLIQ

SEQ ID NO: 7735 - protein, 5 aa, Homo sapiens
PGSSR

SEQ ID NO: 7736 - protein, 5 aa, Homo sapiens
PLCIC

SEQ ID NO: 7737 - protein, 5 aa, Homo sapiens
HLQIY

SEQ ID NO: 7738 - protein, 5 aa, Homo sapiens
KKHGM

SEQ ID NO: 7739 - protein, 5 aa, Homo sapiens
LRGGC

SEQ ID NO: 7740 - protein, 5 aa, Homo sapiens
QYSFY

SEQ ID NO: 7741 - protein, 5 aa, Homo sapiens
FMDLK

SEQ ID NO: 7742 - protein, 5 aa, Homo sapiens
RSYQY

SEQ ID NO: 7743 - protein, 5 aa, Homo sapiens
RDMRN

SEQ ID NO: 7744 - protein, 5 aa, Homo sapiens
EGHLQ

SEQ ID NO: 7745 - protein, 5 aa, Homo sapiens
TTKAE

SEQ ID NO: 7746 - protein, 5 aa, Homo sapiens
VSGQS

SEQ ID NO: 7747 - protein, 5 aa, Homo sapiens
KESKK

SEQ ID NO: 7748 - protein, 5 aa, Homo sapiens
PEEIN

SEQ ID NO: 7749 - protein, 5 aa, Homo sapiens
PKIHP

SEQ ID NO: 7750 - protein, 5 aa, Homo sapiens
GDTSL

SEQ ID NO: 7751 - protein, 5 aa, Homo sapiens
PPLFF

SEQ ID NO: 7752 - protein, 5 aa, Homo sapiens
AQEDL

SEQ ID NO: 7753 - protein, 5 aa, Homo sapiens
MKKHR

SEQ ID NO: 7754 - protein, 5 aa, Homo sapiens
LFSEK

SEQ ID NO: 7755 - protein, 5 aa, Homo sapiens
GELWK

SEQ ID NO: 7756 - protein, 5 aa, Homo sapiens
MPQAN

SEQ ID NO: 7757 - protein, 5 aa, Homo sapiens
GAFSS

SEQ ID NO: 7758 - protein, 5 aa, Homo sapiens
KGKND

SEQ ID NO: 7759 - protein, 5 aa, Homo sapiens
TPPTA

SEQ ID NO: 7760 - protein, 5 aa, Homo sapiens
SVTQA

SEQ ID NO: 7761 - protein, 5 aa, Homo sapiens
RLQWE

SEQ ID NO: 7762 - protein, 5 aa, Homo sapiens
RRRWT

SEQ ID NO: 7763 - protein, 5 aa, Homo sapiens
CCCKK

SEQ ID NO: 7764 - protein, 5 aa, Homo sapiens
CDRSI

SEQ ID NO: 7765 - protein, 5 aa, Homo sapiens
SNLEK

SEQ ID NO: 7766 - protein, 5 aa, Homo sapiens
GINKY

SEQ ID NO: 7767 - protein, 5 aa, Homo sapiens
RTHNP

SEQ ID NO: 7768 - protein, 5 aa, Homo sapiens
GFSVS

SEQ ID NO: 7769 - protein, 5 aa, Homo sapiens
RKFFI

SEQ ID NO: 7770 - protein, 5 aa, Homo sapiens
PEDRQ

SEQ ID NO: 7771 - protein, 5 aa, Homo sapiens
KMWTS

SEQ ID NO: 7772 - protein, 5 aa, Homo sapiens
FDLYT

SEQ ID NO: 7773 - protein, 5 aa, Homo sapiens
IAELK

SEQ ID NO: 7774 - protein, 5 aa, Homo sapiens
EGQFN

SEQ ID NO: 7775 - protein, 5 aa, Homo sapiens
FDLLS

SEQ ID NO: 7776 - protein, 5 aa, Homo sapiens
LSGRS

SEQ ID NO: 7777 - protein, 5 aa, Homo sapiens
CKAYS

SEQ ID NO: 7778 - protein, 5 aa, Homo sapiens
PVDYS

SEQ ID NO: 7779 - protein, 5 aa, Homo sapiens
VAALT

SEQ ID NO: 7780 - protein, 5 aa, Homo sapiens
RCWQV

SEQ ID NO: 7781 - protein, 5 aa, Homo sapiens
EVGLP

SEQ ID NO: 7782 - protein, 5 aa, Homo sapiens
PENSS

SEQ ID NO: 7783 - protein, 5 aa, Homo sapiens
LAIGI

SEQ ID NO: 7784 - protein, 5 aa, Homo sapiens
RVTFQ

SEQ ID NO: 7785 - protein, 5 aa, Homo sapiens
QYNSL

SEQ ID NO: 7786 - protein, 5 aa, Homo sapiens
HEGDD

SEQ ID NO: 7787 - protein, 5 aa, Homo sapiens
CLLAG

SEQ ID NO: 7788 - protein, 5 aa, Homo sapiens
MKLSV

SEQ ID NO: 7789 - protein, 5 aa, Homo sapiens
QPSRT

SEQ ID NO: 7790 - protein, 5 aa, Homo sapiens
PADPE

SEQ ID NO: 7791 - protein, 5 aa, Homo sapiens
WRKTL

SEQ ID NO: 7792 - protein, 5 aa, Homo sapiens
YEERT

SEQ ID NO: 7793 - protein, 5 aa, Homo sapiens
RKGPD

SEQ ID NO: 7794 - protein, 5 aa, Homo sapiens
ITMNP

SEQ ID NO: 7795 - protein, 5 aa, Homo sapiens
IGILQ

SEQ ID NO: 7796 - protein, 5 aa, Homo sapiens
CLVVR

SEQ ID NO: 7797 - protein, 5 aa, Homo sapiens
PVKAK

SEQ ID NO: 7798 - protein, 5 aa, Homo sapiens
SLQAY

SEQ ID NO: 7799 - protein, 5 aa, Homo sapiens
AGSRH

SEQ ID NO: 7800 - protein, 5 aa, Homo sapiens
RSPDS

SEQ ID NO: 7801 - protein, 5 aa, Homo sapiens
SQILS

SEQ ID NO: 7802 - protein, 5 aa, Homo sapiens
APSLF

SEQ ID NO: 7803 - protein, 5 aa, Homo sapiens
GLPEC

SEQ ID NO: 7804 - protein, 5 aa, Homo sapiens
SSVIW

SEQ ID NO: 7805 - protein, 5 aa, Homo sapiens
DEKPF

SEQ ID NO: 7806 - protein, 5 aa, Homo sapiens
QTPES

SEQ ID NO: 7807 - protein, 5 aa, Homo sapiens
KRISS

SEQ ID NO: 7808 - protein, 5 aa, Homo sapiens
KGKRD

SEQ ID NO: 7809 - protein, 5 aa, Homo sapiens
PSVSN

SEQ ID NO: 7810 - protein, 5 aa, Homo sapiens
TMETE

SEQ ID NO: 7811 - protein, 5 aa, Homo sapiens
ALPSA

SEQ ID NO: 7812 - protein, 5 aa, Homo sapiens
VWPTN

SEQ ID NO: 7813 - protein, 5 aa, Homo sapiens
LKINK

SEQ ID NO: 7814 - protein, 5 aa, Homo sapiens
LKIWN

SEQ ID NO: 7815 - protein, 5 aa, Homo sapiens
QRVPF

SEQ ID NO: 7816 - protein, 5 aa, Homo sapiens
SQLLS

SEQ ID NO: 7817 - protein, 5 aa, Homo sapiens
RARLS

SEQ ID NO: 7818 - protein, 5 aa, Homo sapiens
STTRV

SEQ ID NO: 7819 - protein, 5 aa, Homo sapiens
KGQPH

SEQ ID NO: 7820 - protein, 5 aa, Homo sapiens
GDLKY

SEQ ID NO: 7821 - protein, 5 aa, Homo sapiens
HATAM

SEQ ID NO: 7822 - protein, 5 aa, Homo sapiens
PLDPP

SEQ ID NO: 7823 - protein, 5 aa, Homo sapiens
PEVKS

SEQ ID NO: 7824 - protein, 5 aa, Homo sapiens
NDSLL

SEQ ID NO: 7825 - protein, 5 aa, Homo sapiens
GHKHT

SEQ ID NO: 7826 - protein, 5 aa, Homo sapiens
KLVYK

SEQ ID NO: 7827 - protein, 5 aa, Homo sapiens
VNSSS

SEQ ID NO: 7828 - protein, 5 aa, Homo sapiens
SSGHC

SEQ ID NO: 7829 - protein, 5 aa, Homo sapiens
VVFSV

SEQ ID NO: 7830 - protein, 5 aa, Homo sapiens
KLACE

SEQ ID NO: 7831 - protein, 5 aa, Homo sapiens
MRRLT

SEQ ID NO: 7832 - protein, 5 aa, Homo sapiens
GHGKF

SEQ ID NO: 7833 - protein, 5 aa, Homo sapiens
RSVNY

SEQ ID NO: 7834 - protein, 5 aa, Homo sapiens
RNPGV

SEQ ID NO: 7835 - protein, 5 aa, Homo sapiens
PSVGP

SEQ ID NO: 7836 - protein, 5 aa, Homo sapiens
GPSLD

SEQ ID NO: 7837 - protein, 5 aa, Homo sapiens
VKEEL

SEQ ID NO: 7838 - protein, 5 aa, Homo sapiens
KISSL

SEQ ID NO: 7839 - protein, 5 aa, Homo sapiens
FKRGK

SEQ ID NO: 7840 - protein, 5 aa, Homo sapiens
LLPQQ

SEQ ID NO: 7841 - protein, 5 aa, Homo sapiens
NVEGI

SEQ ID NO: 7842 - protein, 5 aa, Homo sapiens
GMIPS

SEQ ID NO: 7843 - protein, 5 aa, Homo sapiens
RITFD

SEQ ID NO: 7844 - protein, 5 aa, Homo sapiens
SWGSS

SEQ ID NO: 7845 - protein, 5 aa, Homo sapiens
WASLQ

SEQ ID NO: 7846 - protein, 5 aa, Homo sapiens
WKQKT

SEQ ID NO: 7847 - protein, 5 aa, Homo sapiens
RFHRP

SEQ ID NO: 7848 - protein, 5 aa, Homo sapiens
GYPFK

SEQ ID NO: 7849 - protein, 5 aa, Homo sapiens
YSSLT

SEQ ID NO: 7850 - protein, 5 aa, Homo sapiens
GMGCS

SEQ ID NO: 7851 - protein, 5 aa, Homo sapiens
SPYPY

SEQ ID NO: 7852 - protein, 5 aa, Homo sapiens
AHLKC

SEQ ID NO: 7853 - protein, 5 aa, Homo sapiens
ETKSI

SEQ ID NO: 7854 - protein, 5 aa, Homo sapiens
AAWFT

SEQ ID NO: 7855 - protein, 5 aa, Homo sapiens
GRVHF

SEQ ID NO: 7856 - protein, 5 aa, Homo sapiens
MRHPK

SEQ ID NO: 7857 - protein, 5 aa, Homo sapiens
AGGLF

SEQ ID NO: 7858 - protein, 5 aa, Homo sapiens
LGTDN

SEQ ID NO: 7859 - protein, 5 aa, Homo sapiens
RVLHA

SEQ ID NO: 7860 - protein, 5 aa, Homo sapiens
KWKGK

SEQ ID NO: 7861 - protein, 5 aa, Homo sapiens
SGPGN

SEQ ID NO: 7862 - protein, 5 aa, Homo sapiens
SCKIS

SEQ ID NO: 7863 - protein, 5 aa, Homo sapiens
SKRSP

SEQ ID NO: 7864 - protein, 5 aa, Homo sapiens
AEVKS

SEQ ID NO: 7865 - protein, 5 aa, Homo sapiens
DDQTS

SEQ ID NO: 7866 - protein, 5 aa, Homo sapiens
RLEDE

SEQ ID NO: 7867 - protein, 5 aa, Homo sapiens
VHQTS

SEQ ID NO: 7868 - protein, 5 aa, Homo sapiens
GTVSE

SEQ ID NO: 7869 - protein, 5 aa, Homo sapiens
GMLPP

SEQ ID NO: 7870 - protein, 5 aa, Homo sapiens
LVSWC

SEQ ID NO: 7871 - protein, 5 aa, Homo sapiens
GASRE

SEQ ID NO: 7872 - protein, 5 aa, Homo sapiens
PATAR

SEQ ID NO: 7873 - protein, 5 aa, Homo sapiens
YLQED

SEQ ID NO: 7874 - protein, 5 aa, Homo sapiens
LLIDT

SEQ ID NO: 7875 - protein, 5 aa, Homo sapiens
LHSRK

SEQ ID NO: 7876 - protein, 5 aa, Homo sapiens
NKHGC

SEQ ID NO: 7877 - protein, 5 aa, Homo sapiens
YLKLE

SEQ ID NO: 7878 - protein, 5 aa, Homo sapiens
RCQES

SEQ ID NO: 7879 - protein, 5 aa, Homo sapiens
KESHS

SEQ ID NO: 7880 - protein, 5 aa, Homo sapiens
SRLEQ

SEQ ID NO: 7881 - protein, 5 aa, Homo sapiens
ISSVS

SEQ ID NO: 7882 - protein, 5 aa, Homo sapiens
AQRHK

SEQ ID NO: 7883 - protein, 5 aa, Homo sapiens
TRVSQ

SEQ ID NO: 7884 - protein, 5 aa, Homo sapiens
TRYAF

SEQ ID NO: 7885 - protein, 5 aa, Homo sapiens
DWYDS

SEQ ID NO: 7886 - protein, 5 aa, Homo sapiens
NCTAK

SEQ ID NO: 7887 - protein, 5 aa, Homo sapiens
SIAQE

SEQ ID NO: 7888 - protein, 5 aa, Homo sapiens
GPTAE

SEQ ID NO: 7889 - protein, 5 aa, Homo sapiens
PKIHP

SEQ ID NO: 7890 - protein, 5 aa, Homo sapiens
GGGPV

SEQ ID NO: 7891 - protein, 5 aa, Homo sapiens
TGCFC

SEQ ID NO: 7892 - protein, 5 aa, Homo sapiens
SDRLQ

SEQ ID NO: 7893 - protein, 5 aa, Homo sapiens
VMKDL

SEQ ID NO: 7894 - protein, 5 aa, Homo sapiens
ETDPS

SEQ ID NO: 7895 - protein, 5 aa, Homo sapiens
FTSCG

SEQ ID NO: 7896 - protein, 5 aa, Homo sapiens
KLYKL

SEQ ID NO: 7897 - protein, 5 aa, Homo sapiens
LRLNA

SEQ ID NO: 7898 - protein, 5 aa, Homo sapiens
RDPCQ

SEQ ID NO: 7899 - protein, 5 aa, Homo sapiens
LLCPT

SEQ ID NO: 7900 - protein, 5 aa, Homo sapiens
SSDSE

SEQ ID NO: 7901 - protein, 5 aa, Homo sapiens
PETIN

SEQ ID NO: 7902 - protein, 5 aa, Homo sapiens
RKSNP

SEQ ID NO: 7903 - protein, 5 aa, Homo sapiens
AFKGM

SEQ ID NO: 7904 - protein, 5 aa, Homo sapiens
MKNNL

SEQ ID NO: 7905 - protein, 5 aa, Homo sapiens
HRPLH

SEQ ID NO: 7906 - protein, 5 aa, Homo sapiens
DITRL

SEQ ID NO: 7907 - protein, 5 aa, Homo sapiens
LKTKL

SEQ ID NO: 7908 - protein, 5 aa, Homo sapiens
SEPTC

SEQ ID NO: 7909 - protein, 5 aa, Homo sapiens
YVLVN

SEQ ID NO: 7910 - protein, 5 aa, Homo sapiens
HKTEA

SEQ ID NO: 7911 - protein, 5 aa, Homo sapiens
ALSNM

SEQ ID NO: 7912 - protein, 5 aa, Homo sapiens
RRRWT

SEQ ID NO: 7913 - protein, 5 aa, Homo sapiens
DSILK

SEQ ID NO: 7914 - protein, 5 aa, Homo sapiens
ELSKR

SEQ ID NO: 7915 - protein, 5 aa, Homo sapiens
WRRQT

SEQ ID NO: 7916 - protein, 5 aa, Homo sapiens
MKGID

SEQ ID NO: 7917 - protein, 5 aa, Homo sapiens
DRSYH

SEQ ID NO: 7918 - protein, 5 aa, Homo sapiens
GRVQD

SEQ ID NO: 7919 - protein, 5 aa, Homo sapiens
YSSGT

SEQ ID NO: 7920 - protein, 5 aa, Homo sapiens
FFPQQ

SEQ ID NO: 7921 - protein, 5 aa, Homo sapiens
APSSS

SEQ ID NO: 7922 - protein, 5 aa, Homo sapiens
HAPTC

SEQ ID NO: 7923 - protein, 5 aa, Homo sapiens
EKKHK

SEQ ID NO: 7924 - protein, 5 aa, Homo sapiens
EKIAN

SEQ ID NO: 7925 - protein, 5 aa, Homo sapiens
GVSET

SEQ ID NO: 7926 - protein, 5 aa, Homo sapiens
EDLMP

SEQ ID NO: 7927 - protein, 5 aa, Homo sapiens
PNGFH

SEQ ID NO: 7928 - protein, 5 aa, Homo sapiens
SSSSL

SEQ ID NO: 7929 - protein, 5 aa, Homo sapiens
FYQNQ

SEQ ID NO: 7930 - protein, 5 aa, Homo sapiens
LNLTL

SEQ ID NO: 7931 - protein, 5 aa, Homo sapiens
PVPAQ

SEQ ID NO: 7932 - protein, 5 aa, Homo sapiens
ISIFQ

SEQ ID NO: 7933 - protein, 5 aa, Homo sapiens
KELTA

SEQ ID NO: 7934 - protein, 5 aa, Homo sapiens
CGKAF

SEQ ID NO: 7935 - protein, 5 aa, Homo sapiens
TLPES

SEQ ID NO: 7936 - protein, 5 aa, Homo sapiens
ESLRR

SEQ ID NO: 7937 - protein, 5 aa, Homo sapiens
TPRGG

SEQ ID NO: 7938 - protein, 5 aa, Homo sapiens
RLSHF

SEQ ID NO: 7939 - protein, 5 aa, Homo sapiens
TLLAL

SEQ ID NO: 7940 - protein, 5 aa, Homo sapiens
RRSSV

SEQ ID NO: 7941 - protein, 5 aa, Homo sapiens
APNEC

SEQ ID NO: 7942 - protein, 5 aa, Homo sapiens
KNPKK

SEQ ID NO: 7943 - protein, 5 aa, Homo sapiens
EEAEG

SEQ ID NO: 7944 - protein, 5 aa, Homo sapiens
ERMKH

SEQ ID NO: 7945 - protein, 5 aa, Homo sapiens
PKTPS

SEQ ID NO: 7946 - protein, 5 aa, Homo sapiens
EDRTQ

SEQ ID NO: 7947 - protein, 5 aa, Homo sapiens
GEGNN

SEQ ID NO: 7948 - protein, 5 aa, Homo sapiens
SLQGI

SEQ ID NO: 7949 - protein, 5 aa, Homo sapiens
MEHQH

SEQ ID NO: 7950 - protein, 5 aa, Homo sapiens
PTEFS

SEQ ID NO: 7951 - protein, 5 aa, Homo sapiens
KHLPS

SEQ ID NO: 7952 - protein, 5 aa, Homo sapiens
PLVTQ

SEQ ID NO: 7953 - protein, 5 aa, Homo sapiens
EVAVP

SEQ ID NO: 7954 - protein, 5 aa, Homo sapiens
MPEGG

SEQ ID NO: 7955 - protein, 5 aa, Homo sapiens
LGGQK

SEQ ID NO: 7956 - protein, 5 aa, Homo sapiens
SMLLQ

SEQ ID NO: 7957 - protein, 5 aa, Homo sapiens
MVIVG

SEQ ID NO: 7958 - protein, 5 aa, Homo sapiens
RPQED

SEQ ID NO: 7959 - protein, 5 aa, Homo sapiens
KARYT

SEQ ID NO: 7960 - protein, 5 aa, Homo sapiens
GNMPY

SEQ ID NO: 7961 - protein, 5 aa, Homo sapiens
IQIHH

SEQ ID NO: 7962 - protein, 5 aa, Homo sapiens
VGTHC

SEQ ID NO: 7963 - protein, 5 aa, Homo sapiens
PIEDY

SEQ ID NO: 7964 - protein, 5 aa, Homo sapiens
KTKQK

SEQ ID NO: 7965 - protein, 5 aa, Homo sapiens
HRKCF

SEQ ID NO: 7966 - protein, 5 aa, Homo sapiens
ADQST

SEQ ID NO: 7967 - protein, 5 aa, Homo sapiens
GTFLF

SEQ ID NO: 7968 - protein, 5 aa, Homo sapiens
KGVDV

SEQ ID NO: 7969 - protein, 5 aa, Homo sapiens
PSRQC

SEQ ID NO: 7970 - protein, 5 aa, Homo sapiens
MTCWC

SEQ ID NO: 7971 - protein, 5 aa, Homo sapiens
RESAI

SEQ ID NO: 7972 - protein, 5 aa, Homo sapiens
LRPGC

SEQ ID NO: 7973 - protein, 5 aa, Homo sapiens
KMEEE

SEQ ID NO: 7974 - protein, 5 aa, Homo sapiens
LHIAT

SEQ ID NO: 7975 - protein, 5 aa, Homo sapiens
EDYRL

SEQ ID NO: 7976 - protein, 5 aa, Homo sapiens
HPNYN

SEQ ID NO: 7977 - protein, 5 aa, Homo sapiens
SLLAL

SEQ ID NO: 7978 - protein, 5 aa, Homo sapiens
LAVSD

SEQ ID NO: 7979 - protein, 5 aa, Homo sapiens
FDSQP

SEQ ID NO: 7980 - protein, 5 aa, Homo sapiens
DLLSS

SEQ ID NO: 7981 - protein, 5 aa, Homo sapiens
ELVPQ

SEQ ID NO: 7982 - protein, 5 aa, Homo sapiens
TVLTF

SEQ ID NO: 7983 - protein, 5 aa, Homo sapiens
MSKRS

SEQ ID NO: 7984 - protein, 5 aa, Homo sapiens
QCGEM

SEQ ID NO: 7985 - protein, 5 aa, Homo sapiens
PASKR

SEQ ID NO: 7986 - protein, 5 aa, Homo sapiens
KVRKE

SEQ ID NO: 7987 - protein, 5 aa, Homo sapiens
SRSSG

SEQ ID NO: 7988 - protein, 5 aa, Homo sapiens
SENKG

SEQ ID NO: 7989 - protein, 5 aa, Homo sapiens
LKLAL

SEQ ID NO: 7990 - protein, 5 aa, Homo sapiens
IGFIF

SEQ ID NO: 7991 - protein, 5 aa, Homo sapiens
APGQF

SEQ ID NO: 7992 - protein, 5 aa, Homo sapiens
LPASS

SEQ ID NO: 7993 - protein, 5 aa, Homo sapiens
AEMEI

SEQ ID NO: 7994 - protein, 5 aa, Homo sapiens
TVCVC

SEQ ID NO: 7995 - protein, 5 aa, Homo sapiens
KRKLI

SEQ ID NO: 7996 - protein, 5 aa, Homo sapiens
SQLQS

SEQ ID NO: 7997 - protein, 5 aa, Homo sapiens
FSFFF

SEQ ID NO: 7998 - protein, 5 aa, Homo sapiens
YLFPL

SEQ ID NO: 7999 - protein, 5 aa, Homo sapiens
ISIDF

SEQ ID NO: 8000 - protein, 5 aa, Homo sapiens
TRYMT

SEQ ID NO: 8001 - protein, 5 aa, Homo sapiens
RERQK

SEQ ID NO: 8002 - protein, 5 aa, Homo sapiens
AFFHN

SEQ ID NO: 8003 - protein, 5 aa, Homo sapiens
LSPPK

SEQ ID NO: 8004 - protein, 5 aa, Homo sapiens
EIQRV

SEQ ID NO: 8005 - protein, 5 aa, Homo sapiens
PQASQ

SEQ ID NO: 8006 - protein, 5 aa, Homo sapiens
TLKHH

SEQ ID NO: 8007 - protein, 5 aa, Homo sapiens
HLAQN

SEQ ID NO: 8008 - protein, 5 aa, Homo sapiens
EKKNE

SEQ ID NO: 8009 - protein, 5 aa, Homo sapiens
LPNDS

SEQ ID NO: 8010 - protein, 5 aa, Homo sapiens
SVAVH

SEQ ID NO: 8011 - protein, 5 aa, Homo sapiens
DVSCV

SEQ ID NO: 8012 - protein, 5 aa, Homo sapiens
PLTLF

SEQ ID NO: 8013 - protein, 5 aa, Homo sapiens
DSMIS

SEQ ID NO: 8014 - protein, 5 aa, Homo sapiens
EESSV

SEQ ID NO: 8015 - protein, 5 aa, Homo sapiens
PPALR

SEQ ID NO: 8016 - protein, 5 aa, Homo sapiens
AKPYI

SEQ ID NO: 8017 - protein, 5 aa, Homo sapiens
SVYGL

SEQ ID NO: 8018 - protein, 5 aa, Homo sapiens
VSSAA

SEQ ID NO: 8019 - protein, 5 aa, Homo sapiens
ERKNF

SEQ ID NO: 8020 - protein, 5 aa, Homo sapiens
GKEIH

SEQ ID NO: 8021 - protein, 5 aa, Homo sapiens
HVGRN

SEQ ID NO: 8022 - protein, 5 aa, Homo sapiens
EGFAY

SEQ ID NO: 8023 - protein, 5 aa, Homo sapiens
WLTVK

SEQ ID NO: 8024 - protein, 5 aa, Homo sapiens
GAMYT

SEQ ID NO: 8025 - protein, 5 aa, Homo sapiens
AESKL

SEQ ID NO: 8026 - protein, 5 aa, Homo sapiens
VASTV

SEQ ID NO: 8027 - protein, 5 aa, Homo sapiens
WLDHV

SEQ ID NO: 8028 - protein, 5 aa, Homo sapiens
AETVA

SEQ ID NO: 8029 - protein, 5 aa, Homo sapiens
QEKHY

SEQ ID NO: 8030 - protein, 5 aa, Homo sapiens
QSGDL

SEQ ID NO: 8031 - protein, 5 aa, Homo sapiens
EANSP

SEQ ID NO: 8032 - protein, 5 aa, Homo sapiens
FEMQA

SEQ ID NO: 8033 - protein, 5 aa, Homo sapiens
LNEDQ

SEQ ID NO: 8034 - protein, 5 aa, Homo sapiens
MVLDV

SEQ ID NO: 8035 - protein, 5 aa, Homo sapiens
ESEDL

SEQ ID NO: 8036 - protein, 5 aa, Homo sapiens
YNFNS

SEQ ID NO: 8037 - protein, 5 aa, Homo sapiens
FMKRK

SEQ ID NO: 8038 - protein, 5 aa, Homo sapiens
VQPYL

SEQ ID NO: 8039 - protein, 5 aa, Homo sapiens
KKTMR

SEQ ID NO: 8040 - protein, 5 aa, Homo sapiens
MPASA

SEQ ID NO: 8041 - protein, 5 aa, Homo sapiens
CSPSS

SEQ ID NO: 8042 - protein, 5 aa, Homo sapiens
ISSLC

SEQ ID NO: 8043 - protein, 5 aa, Homo sapiens
PSHLQ

SEQ ID NO: 8044 - protein, 5 aa, Homo sapiens
KEFYA

SEQ ID NO: 8045 - protein, 5 aa, Homo sapiens
FLVKS

SEQ ID NO: 8046 - protein, 5 aa, Homo sapiens
RPSVG

SEQ ID NO: 8047 - protein, 5 aa, Homo sapiens
SLSLM

SEQ ID NO: 8048 - protein, 5 aa, Homo sapiens
EAKKT

SEQ ID NO: 8049 - protein, 5 aa, Homo sapiens
FKFPG

SEQ ID NO: 8050 - protein, 5 aa, Homo sapiens
GGKQV

SEQ ID NO: 8051 - protein, 5 aa, Homo sapiens
PPTPT

SEQ ID NO: 8052 - protein, 5 aa, Homo sapiens
YETDL

SEQ ID NO: 8053 - protein, 5 aa, Homo sapiens
IESSP

SEQ ID NO: 8054 - protein, 5 aa, Homo sapiens
VHFDG

SEQ ID NO: 8055 - protein, 5 aa, Homo sapiens
KRYAT

SEQ ID NO: 8056 - protein, 5 aa, Homo sapiens
GLGPA

SEQ ID NO: 8057 - protein, 5 aa, Homo sapiens
AKDGL

SEQ ID NO: 8058 - protein, 5 aa, Homo sapiens
AKARK

SEQ ID NO: 8059 - protein, 5 aa, Homo sapiens
CPLSS

SEQ ID NO: 8060 - protein, 5 aa, Homo sapiens
KCRKV

SEQ ID NO: 8061 - protein, 5 aa, Homo sapiens
PDSWV

SEQ ID NO: 8062 - protein, 5 aa, Homo sapiens
MPFYQ

SEQ ID NO: 8063 - protein, 5 aa, Homo sapiens
YNWRS

SEQ ID NO: 8064 - protein, 5 aa, Homo sapiens
DSSRY

SEQ ID NO: 8065 - protein, 5 aa, Homo sapiens
YNTCQ

SEQ ID NO: 8066 - protein, 5 aa, Homo sapiens
RKIFS

SEQ ID NO: 8067 - protein, 5 aa, Homo sapiens
CNEDL

SEQ ID NO: 8068 - protein, 5 aa, Homo sapiens
PYGYY

SEQ ID NO: 8069 - protein, 5 aa, Homo sapiens
DRRSR

SEQ ID NO: 8070 - protein, 5 aa, Homo sapiens
PGRGS

SEQ ID NO: 8071 - protein, 5 aa, Homo sapiens
TKRNC

SEQ ID NO: 8072 - protein, 5 aa, Homo sapiens
PPPSS

SEQ ID NO: 8073 - protein, 5 aa, Homo sapiens
LSSFR

SEQ ID NO: 8074 - protein, 5 aa, Homo sapiens
VIQNN

SEQ ID NO: 8075 - protein, 5 aa, Homo sapiens
QSTAS

SEQ ID NO: 8076 - protein, 5 aa, Homo sapiens
LSAGQ

SEQ ID NO: 8077 - protein, 5 aa, Homo sapiens
RFFTI

SEQ ID NO: 8078 - protein, 5 aa, Homo sapiens
SDDYM

SEQ ID NO: 8079 - protein, 5 aa, Homo sapiens
PLPSN

SEQ ID NO: 8080 - protein, 5 aa, Homo sapiens
KTLNI

SEQ ID NO: 8081 - protein, 5 aa, Homo sapiens
FQQGT

SEQ ID NO: 8082 - protein, 5 aa, Homo sapiens
RVKSC

SEQ ID NO: 8083 - protein, 5 aa, Homo sapiens
EETPM

SEQ ID NO: 8084 - protein, 5 aa, Homo sapiens
GALKK

SEQ ID NO: 8085 - protein, 5 aa, Homo sapiens
ADSEM

SEQ ID NO: 8086 - protein, 5 aa, Homo sapiens
KERDP

SEQ ID NO: 8087 - protein, 5 aa, Homo sapiens
EKRVR

SEQ ID NO: 8088 - protein, 5 aa, Homo sapiens
AFRAP

SEQ ID NO: 8089 - protein, 5 aa, Homo sapiens
HIMSI

SEQ ID NO: 8090 - protein, 5 aa, Homo sapiens
RITFV

SEQ ID NO: 8091 - protein, 5 aa, Homo sapiens
MESVA

SEQ ID NO: 8092 - protein, 5 aa, Homo sapiens
EACQQ

SEQ ID NO: 8093 - protein, 5 aa, Homo sapiens
FVGFH

SEQ ID NO: 8094 - protein, 5 aa, Homo sapiens
NENDE

SEQ ID NO: 8095 - protein, 5 aa, Homo sapiens
LIEEC

SEQ ID NO: 8096 - protein, 5 aa, Homo sapiens
NFNFT

SEQ ID NO: 8097 - protein, 5 aa, Homo sapiens
KTKQK

SEQ ID NO: 8098 - protein, 5 aa, Homo sapiens
FASNL

SEQ ID NO: 8099 - protein, 5 aa, Homo sapiens
RTRSC

SEQ ID NO: 8100 - protein, 5 aa, Homo sapiens
HSKLH

SEQ ID NO: 8101 - protein, 5 aa, Homo sapiens
FRGKQ

SEQ ID NO: 8102 - protein, 5 aa, Homo sapiens
YRRLQ

SEQ ID NO: 8103 - protein, 5 aa, Homo sapiens
SVAKK

SEQ ID NO: 8104 - protein, 5 aa, Homo sapiens
RSSVL

SEQ ID NO: 8105 - protein, 5 aa, Homo sapiens
LNELN

SEQ ID NO: 8106 - protein, 5 aa, Homo sapiens
AHSTL

SEQ ID NO: 8107 - protein, 5 aa, Homo sapiens
TVGRD

SEQ ID NO: 8108 - protein, 5 aa, Homo sapiens
CTMKS

SEQ ID NO: 8109 - protein, 5 aa, Homo sapiens
ALSVP

SEQ ID NO: 8110 - protein, 5 aa, Homo sapiens
DAARQ

SEQ ID NO: 8111 - protein, 5 aa, Homo sapiens
RQKST

SEQ ID NO: 8112 - protein, 5 aa, Homo sapiens
SEPPM

SEQ ID NO: 8113 - protein, 5 aa, Homo sapiens
NEQQE

SEQ ID NO: 8114 - protein, 5 aa, Homo sapiens
IQPQT

SEQ ID NO: 8115 - protein, 5 aa, Homo sapiens
SKTGI

SEQ ID NO: 8116 - protein, 5 aa, Homo sapiens
ASMLT

SEQ ID NO: 8117 - protein, 5 aa, Homo sapiens
RCQEA

SEQ ID NO: 8118 - protein, 5 aa, Homo sapiens
CRQIN

SEQ ID NO: 8119 - protein, 5 aa, Homo sapiens
SRNPL

SEQ ID NO: 8120 - protein, 5 aa, Homo sapiens
DPGKV

SEQ ID NO: 8121 - protein, 5 aa, Homo sapiens
KNIIL

SEQ ID NO: 8122 - protein, 5 aa, Homo sapiens
KVHCD

SEQ ID NO: 8123 - protein, 5 aa, Homo sapiens
PSTLL

SEQ ID NO: 8124 - protein, 5 aa, Homo sapiens
QKKKL

SEQ ID NO: 8125 - protein, 5 aa, Homo sapiens
TAGAN

SEQ ID NO: 8126 - protein, 5 aa, Homo sapiens
VPTII

SEQ ID NO: 8127 - protein, 5 aa, Homo sapiens
PRDSR

SEQ ID NO: 8128 - protein, 5 aa, Homo sapiens
AGAGQ

SEQ ID NO: 8129 - protein, 5 aa, Homo sapiens
DRPKR

SEQ ID NO: 8130 - protein, 5 aa, Homo sapiens
GIEFI

SEQ ID NO: 8131 - protein, 5 aa, Homo sapiens
KLLDG

SEQ ID NO: 8132 - protein, 5 aa, Homo sapiens
HPQMY

SEQ ID NO: 8133 - protein, 5 aa, Homo sapiens
WRSKL

SEQ ID NO: 8134 - protein, 5 aa, Homo sapiens
VRASW

SEQ ID NO: 8135 - protein, 5 aa, Homo sapiens
AAKKK

SEQ ID NO: 8136 - protein, 5 aa, Homo sapiens
AGSRQ

SEQ ID NO: 8137 - protein, 5 aa, Homo sapiens
GGAWL

SEQ ID NO: 8138 - protein, 5 aa, Homo sapiens
KTQGH

SEQ ID NO: 8139 - protein, 5 aa, Homo sapiens
GREVG

SEQ ID NO: 8140 - protein, 5 aa, Homo sapiens
FWKGQ

SEQ ID NO: 8141 - protein, 5 aa, Homo sapiens
SRTIQ

SEQ ID NO: 8142 - protein, 5 aa, Homo sapiens
GQRRE

SEQ ID NO: 8143 - protein, 5 aa, Homo sapiens
RLNEK

SEQ ID NO: 8144 - protein, 5 aa, Homo sapiens
ELAHS

SEQ ID NO: 8145 - protein, 5 aa, Homo sapiens
CREHT

SEQ ID NO: 8146 - protein, 5 aa, Homo sapiens
KKDPR

SEQ ID NO: 8147 - protein, 5 aa, Homo sapiens
KATNE

SEQ ID NO: 8148 - protein, 5 aa, Homo sapiens
DSDLE

SEQ ID NO: 8149 - protein, 5 aa, Homo sapiens
NPVFD

SEQ ID NO: 8150 - protein, 5 aa, Homo sapiens
YSRWI

SEQ ID NO: 8151 - protein, 5 aa, Homo sapiens
GCECC

SEQ ID NO: 8152 - protein, 5 aa, Homo sapiens
ELVGL

SEQ ID NO: 8153 - protein, 5 aa, Homo sapiens
NSSEI

SEQ ID NO: 8154 - protein, 5 aa, Homo sapiens
GTARS

SEQ ID NO: 8155 - protein, 5 aa, Homo sapiens
LGSSK

SEQ ID NO: 8156 - protein, 5 aa, Homo sapiens
CKKDS

SEQ ID NO: 8157 - protein, 5 aa, Homo sapiens
VPVNR

SEQ ID NO: 8158 - protein, 5 aa, Homo sapiens
YGPLT

SEQ ID NO: 8159 - protein, 5 aa, Homo sapiens
YYREK

SEQ ID NO: 8160 - protein, 5 aa, Homo sapiens
KGDVG

SEQ ID NO: 8161 - protein, 5 aa, Homo sapiens
KDKVR

SEQ ID NO: 8162 - protein, 5 aa, Homo sapiens
QLSLT

SEQ ID NO: 8163 - protein, 5 aa, Homo sapiens
RRDFW

SEQ ID NO: 8164 - protein, 5 aa, Homo sapiens
PPAHL

SEQ ID NO: 8165 - protein, 5 aa, Homo sapiens
PSVEI

SEQ ID NO: 8166 - protein, 5 aa, Homo sapiens
SGGPN

SEQ ID NO: 8167 - protein, 5 aa, Homo sapiens
QPTEQ

SEQ ID NO: 8168 - protein, 5 aa, Homo sapiens
VEKKK

SEQ ID NO: 8169 - protein, 5 aa, Homo sapiens
FQYKN

SEQ ID NO: 8170 - protein, 5 aa, Homo sapiens
IIHTR

SEQ ID NO: 8171 - protein, 5 aa, Homo sapiens
RKPRL

SEQ ID NO: 8172 - protein, 5 aa, Homo sapiens
KIINI

SEQ ID NO: 8173 - protein, 5 aa, Homo sapiens
NVELT

SEQ ID NO: 8174 - protein, 5 aa, Homo sapiens
FLDKL

SEQ ID NO: 8175 - protein, 5 aa, Homo sapiens
MKSPP

SEQ ID NO: 8176 - protein, 5 aa, Homo sapiens
NHPRR

SEQ ID NO: 8177 - protein, 5 aa, Homo sapiens
FSIKE

SEQ ID NO: 8178 - protein, 5 aa, Homo sapiens
APTSR

SEQ ID NO: 8179 - protein, 5 aa, Homo sapiens
RRELK

SEQ ID NO: 8180 - protein, 5 aa, Homo sapiens
ARRRC

SEQ ID NO: 8181 - protein, 5 aa, Homo sapiens
NFPIY

SEQ ID NO: 8182 - protein, 5 aa, Homo sapiens
EKMLR

SEQ ID NO: 8183 - protein, 5 aa, Homo sapiens
LNEEN

SEQ ID NO: 8184 - protein, 5 aa, Homo sapiens
YEPEA

SEQ ID NO: 8185 - protein, 5 aa, Homo sapiens
LHIAT

SEQ ID NO: 8186 - protein, 5 aa, Homo sapiens
QRPSP

SEQ ID NO: 8187 - protein, 5 aa, Homo sapiens
FKTMH

SEQ ID NO: 8188 - protein, 5 aa, Homo sapiens
VAACI

SEQ ID NO: 8189 - protein, 5 aa, Homo sapiens
CRTSV

SEQ ID NO: 8190 - protein, 5 aa, Homo sapiens
LWLLS

SEQ ID NO: 8191 - protein, 5 aa, Homo sapiens
DGEES

SEQ ID NO: 8192 - protein, 5 aa, Homo sapiens
NKVLS

SEQ ID NO: 8193 - protein, 5 aa, Homo sapiens
EKKIQ

SEQ ID NO: 8194 - protein, 5 aa, Homo sapiens
PECSP

SEQ ID NO: 8195 - protein, 5 aa, Homo sapiens
SKTIK

SEQ ID NO: 8196 - protein, 5 aa, Homo sapiens
MDEES

SEQ ID NO: 8197 - protein, 5 aa, Homo sapiens
ILTLT

SEQ ID NO: 8198 - protein, 5 aa, Homo sapiens
PSWTT

SEQ ID NO: 8199 - protein, 5 aa, Homo sapiens
QVPED

SEQ ID NO: 8200 - protein, 5 aa, Homo sapiens
RKRKQ

SEQ ID NO: 8201 - protein, 5 aa, Homo sapiens
LLDKV

SEQ ID NO: 8202 - protein, 5 aa, Homo sapiens
LIVFL

SEQ ID NO: 8203 - protein, 5 aa, Homo sapiens
LGTQS

SEQ ID NO: 8204 - protein, 5 aa, Homo sapiens
VMRLG

SEQ ID NO: 8205 - protein, 5 aa, Homo sapiens
ISQPN

SEQ ID NO: 8206 - protein, 5 aa, Homo sapiens
KLTHL

SEQ ID NO: 8207 - protein, 5 aa, Homo sapiens
APTPN

SEQ ID NO: 8208 - protein, 5 aa, Homo sapiens
LSHFK

SEQ ID NO: 8209 - protein, 5 aa, Homo sapiens
VGWSV

SEQ ID NO: 8210 - protein, 5 aa, Homo sapiens
TYGIY

SEQ ID NO: 8211 - protein, 5 aa, Homo sapiens
TKSSQ

SEQ ID NO: 8212 - protein, 5 aa, Homo sapiens
YREGF

SEQ ID NO: 8213 - protein, 5 aa, Homo sapiens
QQEKQ

SEQ ID NO: 8214 - protein, 5 aa, Homo sapiens
EEDLA

SEQ ID NO: 8215 - protein, 5 aa, Homo sapiens
EEETR

SEQ ID NO: 8216 - protein, 5 aa, Homo sapiens
LGPYY

SEQ ID NO: 8217 - protein, 5 aa, Homo sapiens
IILTC

SEQ ID NO: 8218 - protein, 5 aa, Homo sapiens
NAEGE

SEQ ID NO: 8219 - protein, 5 aa, Homo sapiens
PTQPC

SEQ ID NO: 8220 - protein, 5 aa, Homo sapiens
EILRV

SEQ ID NO: 8221 - protein, 5 aa, Homo sapiens
STFSK

SEQ ID NO: 8222 - protein, 5 aa, Homo sapiens
SGIVQ

SEQ ID NO: 8223 - protein, 5 aa, Homo sapiens
RLCCL

SEQ ID NO: 8224 - protein, 5 aa, Homo sapiens
STDTL

SEQ ID NO: 8225 - protein, 5 aa, Homo sapiens
RQVLQ

SEQ ID NO: 8226 - protein, 5 aa, Homo sapiens
SQGSS

SEQ ID NO: 8227 - protein, 5 aa, Homo sapiens
QQKTA

SEQ ID NO: 8228 - protein, 5 aa, Homo sapiens
VAFLA

SEQ ID NO: 8229 - protein, 5 aa, Homo sapiens
GRPGR

SEQ ID NO: 8230 - protein, 5 aa, Homo sapiens
ESKSS

SEQ ID NO: 8231 - protein, 5 aa, Homo sapiens
HQGIR

SEQ ID NO: 8232 - protein, 5 aa, Homo sapiens
SCSIM

SEQ ID NO: 8233 - protein, 5 aa, Homo sapiens
GTLTA

SEQ ID NO: 8234 - protein, 5 aa, Homo sapiens
CENNA

SEQ ID NO: 8235 - protein, 5 aa, Homo sapiens
LELLS

SEQ ID NO: 8236 - protein, 5 aa, Homo sapiens
ADEPS

SEQ ID NO: 8237 - protein, 5 aa, Homo sapiens
HQNRY

SEQ ID NO: 8238 - protein, 5 aa, Homo sapiens
TSSMV

SEQ ID NO: 8239 - protein, 5 aa, Homo sapiens
VEVKF

SEQ ID NO: 8240 - protein, 5 aa, Homo sapiens
DQFGE

SEQ ID NO: 8241 - protein, 5 aa, Homo sapiens
RSPSH

SEQ ID NO: 8242 - protein, 5 aa, Homo sapiens
EELPS

SEQ ID NO: 8243 - protein, 5 aa, Homo sapiens
ERPDD

SEQ ID NO: 8244 - protein, 5 aa, Homo sapiens
SNGMS

SEQ ID NO: 8245 - protein, 5 aa, Homo sapiens
FCVVT

SEQ ID NO: 8246 - protein, 5 aa, Homo sapiens
MWESL

SEQ ID NO: 8247 - protein, 5 aa, Homo sapiens
GPQGP

SEQ ID NO: 8248 - protein, 5 aa, Homo sapiens
IRKLY

SEQ ID NO: 8249 - protein, 5 aa, Homo sapiens
IQSEL

SEQ ID NO: 8250 - protein, 5 aa, Homo sapiens
SCGGL

SEQ ID NO: 8251 - protein, 5 aa, Homo sapiens
RRLFD

SEQ ID NO: 8252 - protein, 5 aa, Homo sapiens
GLLTP

SEQ ID NO: 8253 - protein, 5 aa, Homo sapiens
SFWRS

SEQ ID NO: 8254 - protein, 5 aa, Homo sapiens
SLKFS

SEQ ID NO: 8255 - protein, 5 aa, Homo sapiens
GPPLS

SEQ ID NO: 8256 - protein, 5 aa, Homo sapiens
QPQSV

SEQ ID NO: 8257 - protein, 5 aa, Homo sapiens
EVVKE

SEQ ID NO: 8258 - protein, 5 aa, Homo sapiens
GPRFH

SEQ ID NO: 8259 - protein, 5 aa, Homo sapiens
KVESV

SEQ ID NO: 8260 - protein, 5 aa, Homo sapiens
PARRP

SEQ ID NO: 8261 - protein, 5 aa, Homo sapiens
ACGCS

SEQ ID NO: 8262 - protein, 5 aa, Homo sapiens
FPPGF

SEQ ID NO: 8263 - protein, 5 aa, Homo sapiens
IAANS

SEQ ID NO: 8264 - protein, 5 aa, Homo sapiens
EMEKV

SEQ ID NO: 8265 - protein, 5 aa, Homo sapiens
GEGVK

SEQ ID NO: 8266 - protein, 5 aa, Homo sapiens
KVQPQ

SEQ ID NO: 8267 - protein, 5 aa, Homo sapiens
NLRHY

SEQ ID NO: 8268 - protein, 5 aa, Homo sapiens
EGDHQ

SEQ ID NO: 8269 - protein, 5 aa, Homo sapiens
EQTHN

SEQ ID NO: 8270 - protein, 5 aa, Homo sapiens
IYRKV

SEQ ID NO: 8271 - protein, 5 aa, Homo sapiens
SNLGS

SEQ ID NO: 8272 - protein, 5 aa, Homo sapiens
FRTEI

SEQ ID NO: 8273 - protein, 5 aa, Homo sapiens
VDTSL

SEQ ID NO: 8274 - protein, 5 aa, Homo sapiens
EKDKH

SEQ ID NO: 8275 - protein, 5 aa, Homo sapiens
SITLI

SEQ ID NO: 8276 - protein, 5 aa, Homo sapiens
PQGLE

SEQ ID NO: 8277 - protein, 5 aa, Homo sapiens
RITAG

SEQ ID NO: 8278 - protein, 5 aa, Homo sapiens
HHANS

SEQ ID NO: 8279 - protein, 5 aa, Homo sapiens
PGSSR

SEQ ID NO: 8280 - protein, 5 aa, Homo sapiens
HVQKK

SEQ ID NO: 8281 - protein, 5 aa, Homo sapiens
KDPSS

SEQ ID NO: 8282 - protein, 5 aa, Homo sapiens
RNAYV

SEQ ID NO: 8283 - protein, 5 aa, Homo sapiens
SFPSF

SEQ ID NO: 8284 - protein, 5 aa, Homo sapiens
QYICK

SEQ ID NO: 8285 - protein, 5 aa, Homo sapiens
TLEKS

SEQ ID NO: 8286 - protein, 5 aa, Homo sapiens
QNVNQ

SEQ ID NO: 8287 - protein, 5 aa, Homo sapiens
EAAKK

SEQ ID NO: 8288 - protein, 5 aa, Homo sapiens
KPQLA

SEQ ID NO: 8289 - protein, 5 aa, Homo sapiens
YVTMN

SEQ ID NO: 8290 - protein, 5 aa, Homo sapiens
IFTIS

SEQ ID NO: 8291 - protein, 5 aa, Homo sapiens
TEYCR

SEQ ID NO: 8292 - protein, 5 aa, Homo sapiens
FSEPL

SEQ ID NO: 8293 - protein, 5 aa, Homo sapiens
RTDCL

SEQ ID NO: 8294 - protein, 5 aa, Homo sapiens
PGSYS

SEQ ID NO: 8295 - protein, 5 aa, Homo sapiens
AGQAN

SEQ ID NO: 8296 - protein, 5 aa, Homo sapiens
MSLYK

SEQ ID NO: 8297 - protein, 5 aa, Homo sapiens
LRKRE

SEQ ID NO: 8298 - protein, 5 aa, Homo sapiens
VMRNN

SEQ ID NO: 8299 - protein, 5 aa, Homo sapiens
KNNLG

SEQ ID NO: 8300 - protein, 5 aa, Homo sapiens
SGNRN

SEQ ID NO: 8301 - protein, 5 aa, Homo sapiens
TLHIY

SEQ ID NO: 8302 - protein, 5 aa, Homo sapiens
EITLV

SEQ ID NO: 8303 - protein, 5 aa, Homo sapiens
PEPAG

SEQ ID NO: 8304 - protein, 5 aa, Homo sapiens
QDYIS

SEQ ID NO: 8305 - protein, 5 aa, Homo sapiens
KKLLP

SEQ ID NO: 8306 - protein, 5 aa, Homo sapiens
TLYDL

SEQ ID NO: 8307 - protein, 5 aa, Homo sapiens
PMDHS

SEQ ID NO: 8308 - protein, 5 aa, Homo sapiens
TFKNW

SEQ ID NO: 8309 - protein, 5 aa, Homo sapiens
VQGLL

SEQ ID NO: 8310 - protein, 5 aa, Homo sapiens
EDFRN

SEQ ID NO: 8311 - protein, 5 aa, Homo sapiens
KDTLV

SEQ ID NO: 8312 - protein, 5 aa, Homo sapiens
KLRLG

SEQ ID NO: 8313 - protein, 5 aa, Homo sapiens
PRIIM

SEQ ID NO: 8314 - protein, 5 aa, Homo sapiens
MKFFI

SEQ ID NO: 8315 - protein, 5 aa, Homo sapiens
SPRRC

SEQ ID NO: 8316 - protein, 5 aa, Homo sapiens
SAPSQ

SEQ ID NO: 8317 - protein, 5 aa, Homo sapiens
DPASE

SEQ ID NO: 8318 - protein, 5 aa, Homo sapiens
EEPSP

SEQ ID NO: 8319 - protein, 5 aa, Homo sapiens
RFAPY

SEQ ID NO: 8320 - protein, 5 aa, Homo sapiens
NLRAQ

SEQ ID NO: 8321 - protein, 5 aa, Homo sapiens
TPPCT

SEQ ID NO: 8322 - protein, 5 aa, Homo sapiens
HEEVD

SEQ ID NO: 8323 - protein, 5 aa, Homo sapiens
KETVV

SEQ ID NO: 8324 - protein, 5 aa, Homo sapiens
DLKWK

SEQ ID NO: 8325 - protein, 5 aa, Homo sapiens
TIQAK

SEQ ID NO: 8326 - protein, 5 aa, Homo sapiens
TGEEP

SEQ ID NO: 8327 - protein, 5 aa, Homo sapiens
APLCS

SEQ ID NO: 8328 - protein, 5 aa, Homo sapiens
RYSAF

SEQ ID NO: 8329 - protein, 5 aa, Homo sapiens
EEEAA

SEQ ID NO: 8330 - protein, 5 aa, Homo sapiens
PPGKH

SEQ ID NO: 8331 - protein, 5 aa, Homo sapiens
FVESF

SEQ ID NO: 8332 - protein, 5 aa, Homo sapiens
KPSRV

SEQ ID NO: 8333 - protein, 5 aa, Homo sapiens
GFELS

SEQ ID NO: 8334 - protein, 5 aa, Homo sapiens
ILQHR

SEQ ID NO: 8335 - protein, 5 aa, Homo sapiens
TSASL

SEQ ID NO: 8336 - protein, 5 aa, Homo sapiens
LTSTS

SEQ ID NO: 8337 - protein, 5 aa, Homo sapiens
GKLHK

SEQ ID NO: 8338 - protein, 5 aa, Homo sapiens
VSAQA

SEQ ID NO: 8339 - protein, 5 aa, Homo sapiens
GLLGH

SEQ ID NO: 8340 - protein, 5 aa, Homo sapiens
FRPFS

SEQ ID NO: 8341 - protein, 5 aa, Homo sapiens
PFSRE

SEQ ID NO: 8342 - protein, 5 aa, Homo sapiens
AFLPS

SEQ ID NO: 8343 - protein, 5 aa, Homo sapiens
NVHPC

SEQ ID NO: 8344 - protein, 5 aa, Homo sapiens
IQKIS

SEQ ID NO: 8345 - protein, 5 aa, Homo sapiens
PMGLL

SEQ ID NO: 8346 - protein, 5 aa, Homo sapiens
KKMEM

SEQ ID NO: 8347 - protein, 5 aa, Homo sapiens
NFDNT

SEQ ID NO: 8348 - protein, 5 aa, Homo sapiens
PIQVI

SEQ ID NO: 8349 - protein, 5 aa, Homo sapiens
LHRYR

SEQ ID NO: 8350 - protein, 5 aa, Homo sapiens
SKEAL

SEQ ID NO: 8351 - protein, 5 aa, Homo sapiens
LCLFD

SEQ ID NO: 8352 - protein, 5 aa, Homo sapiens
NYHTL

SEQ ID NO: 8353 - protein, 5 aa, Homo sapiens
CCSHF

SEQ ID NO: 8354 - protein, 5 aa, Homo sapiens
RSSCR

SEQ ID NO: 8355 - protein, 5 aa, Homo sapiens
KEKSS

SEQ ID NO: 8356 - protein, 5 aa, Homo sapiens
TPLSR

SEQ ID NO: 8357 - protein, 5 aa, Homo sapiens
QLGQK

SEQ ID NO: 8358 - protein, 5 aa, Homo sapiens
GHTAS

SEQ ID NO: 8359 - protein, 5 aa, Homo sapiens
PEKTD

SEQ ID NO: 8360 - protein, 5 aa, Homo sapiens
EEEVA

SEQ ID NO: 8361 - protein, 5 aa, Homo sapiens
SSRSH

SEQ ID NO: 8362 - protein, 5 aa, Homo sapiens
EETES

SEQ ID NO: 8363 - protein, 5 aa, Homo sapiens
EQGKE

SEQ ID NO: 8364 - protein, 5 aa, Homo sapiens
LEMKK

SEQ ID NO: 8365 - protein, 5 aa, Homo sapiens
NCKNY

SEQ ID NO: 8366 - protein, 5 aa, Homo sapiens
EDSPN

SEQ ID NO: 8367 - protein, 5 aa, Homo sapiens
EYIDD

SEQ ID NO: 8368 - protein, 5 aa, Homo sapiens
RKMAK

SEQ ID NO: 8369 - protein, 5 aa, Homo sapiens
SLKES

SEQ ID NO: 8370 - protein, 5 aa, Homo sapiens
QFSHL

SEQ ID NO: 8371 - protein, 5 aa, Homo sapiens
RMSSI

SEQ ID NO: 8372 - protein, 5 aa, Homo sapiens
YAPDN

SEQ ID NO: 8373 - protein, 5 aa, Homo sapiens
EGGEN

SEQ ID NO: 8374 - protein, 5 aa, Homo sapiens
TMPPL

SEQ ID NO: 8375 - protein, 5 aa, Homo sapiens
AMRTF

SEQ ID NO: 8376 - protein, 5 aa, Homo sapiens
LAPPG

SEQ ID NO: 8377 - protein, 5 aa, Homo sapiens
KVNAQ

SEQ ID NO: 8378 - protein, 5 aa, Homo sapiens
PASLP

SEQ ID NO: 8379 - protein, 5 aa, Homo sapiens
GSCGF

SEQ ID NO: 8380 - protein, 5 aa, Homo sapiens
QPRKC

SEQ ID NO: 8381 - protein, 5 aa, Homo sapiens
ITSLG

SEQ ID NO: 8382 - protein, 5 aa, Homo sapiens
LAPVA

SEQ ID NO: 8383 - protein, 5 aa, Homo sapiens
YYKGG

SEQ ID NO: 8384 - protein, 5 aa, Homo sapiens
AEIAK

SEQ ID NO: 8385 - protein, 5 aa, Homo sapiens
KARTK

SEQ ID NO: 8386 - protein, 5 aa, Homo sapiens
FNNLK

SEQ ID NO: 8387 - protein, 5 aa, Homo sapiens
MKRHI

SEQ ID NO: 8388 - protein, 5 aa, Homo sapiens
KTILD

SEQ ID NO: 8389 - protein, 5 aa, Homo sapiens
EVRSW

SEQ ID NO: 8390 - protein, 5 aa, Homo sapiens
EFSEF

SEQ ID NO: 8391 - protein, 5 aa, Homo sapiens
SKRSK

SEQ ID NO: 8392 - protein, 5 aa, Homo sapiens
PEAGP

SEQ ID NO: 8393 - protein, 5 aa, Homo sapiens
WGLNH

SEQ ID NO: 8394 - protein, 5 aa, Homo sapiens
VEMGT

SEQ ID NO: 8395 - protein, 5 aa, Homo sapiens
LSSTS

SEQ ID NO: 8396 - protein, 5 aa, Homo sapiens
ILFIQ

SEQ ID NO: 8397 - protein, 5 aa, Homo sapiens
KILNN

SEQ ID NO: 8398 - protein, 5 aa, Homo sapiens
SSSPE

SEQ ID NO: 8399 - protein, 5 aa, Homo sapiens
EGKPL

SEQ ID NO: 8400 - protein, 5 aa, Homo sapiens
PIPED

SEQ ID NO: 8401 - protein, 5 aa, Homo sapiens
SQDTS

SEQ ID NO: 8402 - protein, 5 aa, Homo sapiens
EGTRS

SEQ ID NO: 8403 - protein, 5 aa, Homo sapiens
IYTDT

SEQ ID NO: 8404 - protein, 5 aa, Homo sapiens
TISEI

SEQ ID NO: 8405 - protein, 5 aa, Homo sapiens
WGHCP

SEQ ID NO: 8406 - protein, 5 aa, Homo sapiens
RKSPL

SEQ ID NO: 8407 - protein, 5 aa, Homo sapiens
YRFKR

SEQ ID NO: 8408 - protein, 5 aa, Homo sapiens
RLLGS

SEQ ID NO: 8409 - protein, 5 aa, Homo sapiens
VKFML

SEQ ID NO: 8410 - protein, 5 aa, Homo sapiens
IQLPG

SEQ ID NO: 8411 - protein, 5 aa, Homo sapiens
LFIQI

SEQ ID NO: 8412 - protein, 5 aa, Homo sapiens
LRKKP

SEQ ID NO: 8413 - protein, 5 aa, Homo sapiens
IVKEG

SEQ ID NO: 8414 - protein, 5 aa, Homo sapiens
QEILE

SEQ ID NO: 8415 - protein, 5 aa, Homo sapiens
GLEED

SEQ ID NO: 8416 - protein, 5 aa, Homo sapiens
NKKSG

SEQ ID NO: 8417 - protein, 5 aa, Homo sapiens
NTVLW

SEQ ID NO: 8418 - protein, 5 aa, Homo sapiens
EPMNL

SEQ ID NO: 8419 - protein, 5 aa, Homo sapiens
LISTF

SEQ ID NO: 8420 - protein, 5 aa, Homo sapiens
QRQGR

SEQ ID NO: 8421 - protein, 5 aa, Homo sapiens
NKRTM

SEQ ID NO: 8422 - protein, 5 aa, Homo sapiens
PGNAS

SEQ ID NO: 8423 - protein, 5 aa, Homo sapiens
AFGGQ

SEQ ID NO: 8424 - protein, 5 aa, Homo sapiens
NSDSA

SEQ ID NO: 8425 - protein, 5 aa, Homo sapiens
FGFRR

SEQ ID NO: 8426 - protein, 5 aa, Homo sapiens
GGKNL

SEQ ID NO: 8427 - protein, 5 aa, Homo sapiens
SFSQS

SEQ ID NO: 8428 - protein, 5 aa, Homo sapiens
GEELS

SEQ ID NO: 8429 - protein, 5 aa, Homo sapiens
VTLEQ

SEQ ID NO: 8430 - protein, 5 aa, Homo sapiens
VKELK

SEQ ID NO: 8431 - protein, 5 aa, Homo sapiens
CLMEN

SEQ ID NO: 8432 - protein, 5 aa, Homo sapiens
KTGKQ

SEQ ID NO: 8433 - protein, 5 aa, Homo sapiens
KCVLS

SEQ ID NO: 8434 - protein, 5 aa, Homo sapiens
SPMLK

SEQ ID NO: 8435 - protein, 5 aa, Homo sapiens
GSVKT

SEQ ID NO: 8436 - protein, 5 aa, Homo sapiens
RRAEM

SEQ ID NO: 8437 - protein, 5 aa, Homo sapiens
WSDNS

SEQ ID NO: 8438 - protein, 5 aa, Homo sapiens
RRPSQ

SEQ ID NO: 8439 - protein, 5 aa, Homo sapiens
SCSRC

SEQ ID NO: 8440 - protein, 5 aa, Homo sapiens
ASVLI

SEQ ID NO: 8441 - protein, 5 aa, Homo sapiens
GAYTF

SEQ ID NO: 8442 - protein, 5 aa, Homo sapiens
KETEC

SEQ ID NO: 8443 - protein, 5 aa, Homo sapiens
SPRGR

SEQ ID NO: 8444 - protein, 5 aa, Homo sapiens
PDECV

SEQ ID NO: 8445 - protein, 5 aa, Homo sapiens
TLVSF

SEQ ID NO: 8446 - protein, 5 aa, Homo sapiens
SGGQP

SEQ ID NO: 8447 - protein, 5 aa, Homo sapiens
YHQFK

SEQ ID NO: 8448 - protein, 5 aa, Homo sapiens
ADTEL

SEQ ID NO: 8449 - protein, 5 aa, Homo sapiens
KLVNL

SEQ ID NO: 8450 - protein, 5 aa, Homo sapiens
VQVRF

SEQ ID NO: 8451 - protein, 5 aa, Homo sapiens
PTSTI

SEQ ID NO: 8452 - protein, 5 aa, Homo sapiens
QIENN

SEQ ID NO: 8453 - protein, 5 aa, Homo sapiens
YRSIR

SEQ ID NO: 8454 - protein, 5 aa, Homo sapiens
LSQTP

SEQ ID NO: 8455 - protein, 5 aa, Homo sapiens
IGALQ

SEQ ID NO: 8456 - protein, 5 aa, Homo sapiens
LPPWR

SEQ ID NO: 8457 - protein, 5 aa, Homo sapiens
RVVCL

SEQ ID NO: 8458 - protein, 5 aa, Homo sapiens
PPYSP

SEQ ID NO: 8459 - protein, 5 aa, Homo sapiens
TEIKI

SEQ ID NO: 8460 - protein, 5 aa, Homo sapiens
TPQKK

SEQ ID NO: 8461 - protein, 5 aa, Homo sapiens
QRFMW

SEQ ID NO: 8462 - protein, 5 aa, Homo sapiens
NMKMI

SEQ ID NO: 8463 - protein, 5 aa, Homo sapiens
PNYDL

SEQ ID NO: 8464 - protein, 5 aa, Homo sapiens
EPEEQ

SEQ ID NO: 8465 - protein, 5 aa, Homo sapiens
RRLGG

SEQ ID NO: 8466 - protein, 5 aa, Homo sapiens
AVPRP

SEQ ID NO: 8467 - protein, 5 aa, Homo sapiens
KHLLS

SEQ ID NO: 8468 - protein, 5 aa, Homo sapiens
TLLAL

SEQ ID NO: 8469 - protein, 5 aa, Homo sapiens
KYVAV

SEQ ID NO: 8470 - protein, 5 aa, Homo sapiens
KSVFG

SEQ ID NO: 8471 - protein, 5 aa, Homo sapiens
IYVQQ

SEQ ID NO: 8472 - protein, 5 aa, Homo sapiens
TSKDR

SEQ ID NO: 8473 - protein, 5 aa, Homo sapiens
LDTRF

SEQ ID NO: 8474 - protein, 5 aa, Homo sapiens
WMGGQ

SEQ ID NO: 8475 - protein, 5 aa, Homo sapiens
NTSEA

SEQ ID NO: 8476 - protein, 5 aa, Homo sapiens
QETSL

SEQ ID NO: 8477 - protein, 5 aa, Homo sapiens
LICFL

SEQ ID NO: 8478 - protein, 5 aa, Homo sapiens
IEEVD

SEQ ID NO: 8479 - protein, 5 aa, Homo sapiens
GGGCC

SEQ ID NO: 8480 - protein, 5 aa, Homo sapiens
SSTYF

SEQ ID NO: 8481 - protein, 5 aa, Homo sapiens
QGDCS

SEQ ID NO: 8482 - protein, 5 aa, Homo sapiens
GAGPT

SEQ ID NO: 8483 - protein, 5 aa, Homo sapiens
HINSN

SEQ ID NO: 8484 - protein, 5 aa, Homo sapiens
ATSCL

SEQ ID NO: 8485 - protein, 5 aa, Homo sapiens
PLKLQ

SEQ ID NO: 8486 - protein, 5 aa, Homo sapiens
CDAFL

SEQ ID NO: 8487 - protein, 5 aa, Homo sapiens
NETME

SEQ ID NO: 8488 - protein, 5 aa, Homo sapiens
LKNKS

SEQ ID NO: 8489 - protein, 5 aa, Homo sapiens
KDIRL

SEQ ID NO: 8490 - protein, 5 aa, Homo sapiens
QARLF

SEQ ID NO: 8491 - protein, 5 aa, Homo sapiens
KPLDG

SEQ ID NO: 8492 - protein, 5 aa, Homo sapiens
RHQKS

SEQ ID NO: 8493 - protein, 5 aa, Homo sapiens
YISIL

SEQ ID NO: 8494 - protein, 5 aa, Homo sapiens
EAKGK

SEQ ID NO: 8495 - protein, 5 aa, Homo sapiens
SSPVK

SEQ ID NO: 8496 - protein, 5 aa, Homo sapiens
VKLQC

SEQ ID NO: 8497 - protein, 5 aa, Homo sapiens
HRNIP

SEQ ID NO: 8498 - protein, 5 aa, Homo sapiens
QVNTC

SEQ ID NO: 8499 - protein, 5 aa, Homo sapiens
EEEDN

SEQ ID NO: 8500 - protein, 5 aa, Homo sapiens
VQMAQ

SEQ ID NO: 8501 - protein, 5 aa, Homo sapiens
QNVFI

SEQ ID NO: 8502 - protein, 5 aa, Homo sapiens
NLGIW

SEQ ID NO: 8503 - protein, 5 aa, Homo sapiens
GASFY

SEQ ID NO: 8504 - protein, 5 aa, Homo sapiens
RAAEE

SEQ ID NO: 8505 - protein, 5 aa, Homo sapiens
ASMPA

SEQ ID NO: 8506 - protein, 5 aa, Homo sapiens
TIHVL

SEQ ID NO: 8507 - protein, 5 aa, Homo sapiens
NLRRD

SEQ ID NO: 8508 - protein, 5 aa, Homo sapiens
LESMV

SEQ ID NO: 8509 - protein, 5 aa, Homo sapiens
NTITK

SEQ ID NO: 8510 - protein, 5 aa, Homo sapiens
LVFPV

SEQ ID NO: 8511 - protein, 5 aa, Homo sapiens
RSLAV

SEQ ID NO: 8512 - protein, 5 aa, Homo sapiens
RYSAF

SEQ ID NO: 8513 - protein, 5 aa, Homo sapiens
ETQLI

SEQ ID NO: 8514 - protein, 5 aa, Homo sapiens
ADSCP

SEQ ID NO: 8515 - protein, 5 aa, Homo sapiens
LDTTC

SEQ ID NO: 8516 - protein, 5 aa, Homo sapiens
DPSGL

SEQ ID NO: 8517 - protein, 5 aa, Homo sapiens
CQCKI

SEQ ID NO: 8518 - protein, 5 aa, Homo sapiens
EVLQS

SEQ ID NO: 8519 - protein, 5 aa, Homo sapiens
RSSHL

SEQ ID NO: 8520 - protein, 5 aa, Homo sapiens
RCRRH

SEQ ID NO: 8521 - protein, 5 aa, Homo sapiens
GKGKK

SEQ ID NO: 8522 - protein, 5 aa, Homo sapiens
PDYDV

SEQ ID NO: 8523 - protein, 5 aa, Homo sapiens
AEALP

SEQ ID NO: 8524 - protein, 5 aa, Homo sapiens
PQKQD

SEQ ID NO: 8525 - protein, 5 aa, Homo sapiens
QYLET

SEQ ID NO: 8526 - protein, 5 aa, Homo sapiens
SKKNE

SEQ ID NO: 8527 - protein, 5 aa, Homo sapiens
RVSMI

SEQ ID NO: 8528 - protein, 5 aa, Homo sapiens
QIHAE

SEQ ID NO: 8529 - protein, 5 aa, Homo sapiens
PKFMD

SEQ ID NO: 8530 - protein, 5 aa, Homo sapiens
LEDRN

SEQ ID NO: 8531 - protein, 5 aa, Homo sapiens
KKLWK

SEQ ID NO: 8532 - protein, 5 aa, Homo sapiens
KSQSN

SEQ ID NO: 8533 - protein, 5 aa, Homo sapiens
PTQAP

SEQ ID NO: 8534 - protein, 5 aa, Homo sapiens
LSYRR

SEQ ID NO: 8535 - protein, 5 aa, Homo sapiens
FAKVF

SEQ ID NO: 8536 - protein, 5 aa, Homo sapiens
PHCGE

SEQ ID NO: 8537 - protein, 5 aa, Homo sapiens
TLDEY

SEQ ID NO: 8538 - protein, 5 aa, Homo sapiens
LKGEP

SEQ ID NO: 8539 - protein, 5 aa, Homo sapiens
KEKPE

SEQ ID NO: 8540 - protein, 5 aa, Homo sapiens
KKGKK

SEQ ID NO: 8541 - protein, 5 aa, Homo sapiens
EAEKK

SEQ ID NO: 8542 - protein, 5 aa, Homo sapiens
NEMGA

SEQ ID NO: 8543 - protein, 5 aa, Homo sapiens
PTALP

SEQ ID NO: 8544 - protein, 5 aa, Homo sapiens
TGRMM

SEQ ID NO: 8545 - protein, 5 aa, Homo sapiens
LRPYK

SEQ ID NO: 8546 - protein, 5 aa, Homo sapiens
LRKTS

SEQ ID NO: 8547 - protein, 5 aa, Homo sapiens
EVLMN

SEQ ID NO: 8548 - protein, 5 aa, Homo sapiens
PAPSN

SEQ ID NO: 8549 - protein, 5 aa, Homo sapiens
PYNHV

SEQ ID NO: 8550 - protein, 5 aa, Homo sapiens
EDETS

SEQ ID NO: 8551 - protein, 5 aa, Homo sapiens
FPQNC

SEQ ID NO: 8552 - protein, 5 aa, Homo sapiens
YKVKS

SEQ ID NO: 8553 - protein, 5 aa, Homo sapiens
KAELG

SEQ ID NO: 8554 - protein, 5 aa, Homo sapiens
ETIFA

SEQ ID NO: 8555 - protein, 5 aa, Homo sapiens
TKKWS

SEQ ID NO: 8556 - protein, 5 aa, Homo sapiens
PQVAN

SEQ ID NO: 8557 - protein, 5 aa, Homo sapiens
AVRRN

SEQ ID NO: 8558 - protein, 5 aa, Homo sapiens
SASQF

SEQ ID NO: 8559 - protein, 5 aa, Homo sapiens
AKFDS

SEQ ID NO: 8560 - protein, 5 aa, Homo sapiens
TRVAL

SEQ ID NO: 8561 - protein, 5 aa, Homo sapiens
SADEF

SEQ ID NO: 8562 - protein, 5 aa, Homo sapiens
HSAAS

SEQ ID NO: 8563 - protein, 5 aa, Homo sapiens
KHFLC

SEQ ID NO: 8564 - protein, 5 aa, Homo sapiens
KSTFI

SEQ ID NO: 8565 - protein, 5 aa, Homo sapiens
SETSV

SEQ ID NO: 8566 - protein, 5 aa, Homo sapiens
SHIKL

SEQ ID NO: 8567 - protein, 5 aa, Homo sapiens
KVLPV

SEQ ID NO: 8568 - protein, 5 aa, Homo sapiens
HNSHS

SEQ ID NO: 8569 - protein, 5 aa, Homo sapiens
RAFKR

SEQ ID NO: 8570 - protein, 5 aa, Homo sapiens
VATAN

SEQ ID NO: 8571 - protein, 5 aa, Homo sapiens
GNPSF

SEQ ID NO: 8572 - protein, 5 aa, Homo sapiens
GEPYL

SEQ ID NO: 8573 - protein, 5 aa, Homo sapiens
SAVVD

SEQ ID NO: 8574 - protein, 5 aa, Homo sapiens
QSLTS

SEQ ID NO: 8575 - protein, 5 aa, Homo sapiens
KKRKK

SEQ ID NO: 8576 - protein, 5 aa, Homo sapiens
FAWKR

SEQ ID NO: 8577 - protein, 5 aa, Homo sapiens
DQAVS

SEQ ID NO: 8578 - protein, 5 aa, Homo sapiens
TFSFR

SEQ ID NO: 8579 - protein, 5 aa, Homo sapiens
NKIEN

SEQ ID NO: 8580 - protein, 5 aa, Homo sapiens
SLTEH

SEQ ID NO: 8581 - protein, 5 aa, Homo sapiens
FTTCL

SEQ ID NO: 8582 - protein, 5 aa, Homo sapiens
RWKSS

SEQ ID NO: 8583 - protein, 5 aa, Homo sapiens
TFWEI

SEQ ID NO: 8584 - protein, 5 aa, Homo sapiens
LVHAQ

SEQ ID NO: 8585 - protein, 5 aa, Homo sapiens
YKDMY

SEQ ID NO: 8586 - protein, 5 aa, Homo sapiens
RRTEL

SEQ ID NO: 8587 - protein, 5 aa, Homo sapiens
KRMSK

SEQ ID NO: 8588 - protein, 5 aa, Homo sapiens
QQQPV

SEQ ID NO: 8589 - protein, 5 aa, Homo sapiens
PPQRE

SEQ ID NO: 8590 - protein, 5 aa, Homo sapiens
LRLQP

SEQ ID NO: 8591 - protein, 5 aa, Homo sapiens
NPFKD

SEQ ID NO: 8592 - protein, 5 aa, Homo sapiens
QEDKL

SEQ ID NO: 8593 - protein, 5 aa, Homo sapiens
RGRRL

SEQ ID NO: 8594 - protein, 5 aa, Homo sapiens
AEVRL

SEQ ID NO: 8595 - protein, 5 aa, Homo sapiens
LYFYH

SEQ ID NO: 8596 - protein, 5 aa, Homo sapiens
FNGRV

SEQ ID NO: 8597 - protein, 5 aa, Homo sapiens
DLHTL

SEQ ID NO: 8598 - protein, 5 aa, Homo sapiens
GSLEI

SEQ ID NO: 8599 - protein, 5 aa, Homo sapiens
IQRKT

SEQ ID NO: 8600 - protein, 5 aa, Homo sapiens
EEEVA

SEQ ID NO: 8601 - protein, 5 aa, Homo sapiens
LVLKQ

SEQ ID NO: 8602 - protein, 5 aa, Homo sapiens
KKPKK

SEQ ID NO: 8603 - protein, 5 aa, Homo sapiens
DHMLA

SEQ ID NO: 8604 - protein, 5 aa, Homo sapiens
KKYGI

SEQ ID NO: 8605 - protein, 5 aa, Homo sapiens
SKKSV

SEQ ID NO: 8606 - protein, 5 aa, Homo sapiens
SPGAP

SEQ ID NO: 8607 - protein, 5 aa, Homo sapiens
AKGGA

SEQ ID NO: 8608 - protein, 5 aa, Homo sapiens
VIFPQ

SEQ ID NO: 8609 - protein, 5 aa, Homo sapiens
DYEEL

SEQ ID NO: 8610 - protein, 5 aa, Homo sapiens
PTTVH

SEQ ID NO: 8611 - protein, 5 aa, Homo sapiens
HGALI

SEQ ID NO: 8612 - protein, 5 aa, Homo sapiens
PSSDF

SEQ ID NO: 8613 - protein, 5 aa, Homo sapiens
EMKPK

SEQ ID NO: 8614 - protein, 5 aa, Homo sapiens
SDPCE

SEQ ID NO: 8615 - protein, 5 aa, Homo sapiens
YCLLL

SEQ ID NO: 8616 - protein, 5 aa, Homo sapiens
GRAAP

SEQ ID NO: 8617 - protein, 5 aa, Homo sapiens
FLGLH

SEQ ID NO: 8618 - protein, 5 aa, Homo sapiens
GEPTF

SEQ ID NO: 8619 - protein, 5 aa, Homo sapiens
IVFKD

SEQ ID NO: 8620 - protein, 5 aa, Homo sapiens
AFKLK

SEQ ID NO: 8621 - protein, 5 aa, Homo sapiens
KIVSH

SEQ ID NO: 8622 - protein, 5 aa, Homo sapiens
NLGYV

SEQ ID NO: 8623 - protein, 5 aa, Homo sapiens
IPSKV

SEQ ID NO: 8624 - protein, 5 aa, Homo sapiens
AVKAT

SEQ ID NO: 8625 - protein, 5 aa, Homo sapiens
KHSIL

SEQ ID NO: 8626 - protein, 5 aa, Homo sapiens
SVTSV

SEQ ID NO: 8627 - protein, 5 aa, Homo sapiens
LRPIF

SEQ ID NO: 8628 - protein, 5 aa, Homo sapiens
CQLNS

SEQ ID NO: 8629 - protein, 5 aa, Homo sapiens
EPHDI

SEQ ID NO: 8630 - protein, 5 aa, Homo sapiens
SKSWN

SEQ ID NO: 8631 - protein, 5 aa, Homo sapiens
AAGLI

SEQ ID NO: 8632 - protein, 5 aa, Homo sapiens
VSCPP

SEQ ID NO: 8633 - protein, 5 aa, Homo sapiens
PRSGP

SEQ ID NO: 8634 - protein, 5 aa, Homo sapiens
SSEES

SEQ ID NO: 8635 - protein, 5 aa, Homo sapiens
NCVQM

SEQ ID NO: 8636 - protein, 5 aa, Homo sapiens
DFVFL

SEQ ID NO: 8637 - protein, 5 aa, Homo sapiens
RRKAL

SEQ ID NO: 8638 - protein, 5 aa, Homo sapiens
KRHGF

SEQ ID NO: 8639 - protein, 5 aa, Homo sapiens
AQAGS

SEQ ID NO: 8640 - protein, 5 aa, Homo sapiens
PKESQ

SEQ ID NO: 8641 - protein, 5 aa, Homo sapiens
KKNKK

SEQ ID NO: 8642 - protein, 5 aa, Homo sapiens
SQSTD

SEQ ID NO: 8643 - protein, 5 aa, Homo sapiens
SEGEG

SEQ ID NO: 8644 - protein, 5 aa, Homo sapiens
GRVCP

SEQ ID NO: 8645 - protein, 5 aa, Homo sapiens
HLYPL

SEQ ID NO: 8646 - protein, 5 aa, Homo sapiens
PFFRN

SEQ ID NO: 8647 - protein, 5 aa, Homo sapiens
SLCIT

SEQ ID NO: 8648 - protein, 5 aa, Homo sapiens
EKLFK

SEQ ID NO: 8649 - protein, 5 aa, Homo sapiens
LDKVV

SEQ ID NO: 8650 - protein, 5 aa, Homo sapiens
KLCRI

SEQ ID NO: 8651 - protein, 5 aa, Homo sapiens
KTGMT

SEQ ID NO: 8652 - protein, 5 aa, Homo sapiens
MPMPV

SEQ ID NO: 8653 - protein, 5 aa, Homo sapiens
GGPSS

SEQ ID NO: 8654 - protein, 5 aa, Homo sapiens
GSPVL

SEQ ID NO: 8655 - protein, 5 aa, Homo sapiens
MYDNL

SEQ ID NO: 8656 - protein, 5 aa, Homo sapiens
QVHFK

SEQ ID NO: 8657 - protein, 5 aa, Homo sapiens
KKPAA

SEQ ID NO: 8658 - protein, 5 aa, Homo sapiens
ITLLK

SEQ ID NO: 8659 - protein, 5 aa, Homo sapiens
FAPDP

SEQ ID NO: 8660 - protein, 5 aa, Homo sapiens
GGCSC

SEQ ID NO: 8661 - protein, 5 aa, Homo sapiens
RIHTH

SEQ ID NO: 8662 - protein, 5 aa, Homo sapiens
RPPPE

SEQ ID NO: 8663 - protein, 5 aa, Homo sapiens
GLGSS

SEQ ID NO: 8664 - protein, 5 aa, Homo sapiens
AKLLT

SEQ ID NO: 8665 - protein, 5 aa, Homo sapiens
QPASP

SEQ ID NO: 8666 - protein, 5 aa, Homo sapiens
LLQRK

SEQ ID NO: 8667 - protein, 5 aa, Homo sapiens
FKKNK

SEQ ID NO: 8668 - protein, 5 aa, Homo sapiens
CATST

SEQ ID NO: 8669 - protein, 5 aa, Homo sapiens
GDAEW

SEQ ID NO: 8670 - protein, 5 aa, Homo sapiens
QSQVV

SEQ ID NO: 8671 - protein, 5 aa, Homo sapiens
TQGST

SEQ ID NO: 8672 - protein, 5 aa, Homo sapiens
RRDYF

SEQ ID NO: 8673 - protein, 5 aa, Homo sapiens
GTKPP

SEQ ID NO: 8674 - protein, 5 aa, Homo sapiens
SQISS

SEQ ID NO: 8675 - protein, 5 aa, Homo sapiens
NSEQL

SEQ ID NO: 8676 - protein, 5 aa, Homo sapiens
SRQKP

SEQ ID NO: 8677 - protein, 5 aa, Homo sapiens
GDEGS

SEQ ID NO: 8678 - protein, 5 aa, Homo sapiens
TGERP

SEQ ID NO: 8679 - protein, 5 aa, Homo sapiens
ASKTG

SEQ ID NO: 8680 - protein, 5 aa, Homo sapiens
HHHRG

SEQ ID NO: 8681 - protein, 5 aa, Homo sapiens
CSRPT

SEQ ID NO: 8682 - protein, 5 aa, Homo sapiens
TIVKA

SEQ ID NO: 8683 - protein, 5 aa, Homo sapiens
AEQKT

SEQ ID NO: 8684 - protein, 5 aa, Homo sapiens
SETVV

SEQ ID NO: 8685 - protein, 5 aa, Homo sapiens
KVHGF

SEQ ID NO: 8686 - protein, 5 aa, Homo sapiens
TRENI

SEQ ID NO: 8687 - protein, 5 aa, Homo sapiens
NPGRE

SEQ ID NO: 8688 - protein, 5 aa, Homo sapiens
YLQYQ

SEQ ID NO: 8689 - protein, 5 aa, Homo sapiens
ACQLT

SEQ ID NO: 8690 - protein, 5 aa, Homo sapiens
EKKVK

SEQ ID NO: 8691 - protein, 5 aa, Homo sapiens
HYSSL

SEQ ID NO: 8692 - protein, 5 aa, Homo sapiens
VPGHR

SEQ ID NO: 8693 - protein, 5 aa, Homo sapiens
QLSDL

SEQ ID NO: 8694 - protein, 5 aa, Homo sapiens
PSLLI

SEQ ID NO: 8695 - protein, 5 aa, Homo sapiens
FHSAE

SEQ ID NO: 8696 - protein, 5 aa, Homo sapiens
QNIFA

SEQ ID NO: 8697 - protein, 5 aa, Homo sapiens
YPGGP

SEQ ID NO: 8698 - protein, 5 aa, Homo sapiens
FIIHS

SEQ ID NO: 8699 - protein, 5 aa, Homo sapiens
KISSL

SEQ ID NO: 8700 - protein, 5 aa, Homo sapiens
CSPDD

SEQ ID NO: 8701 - protein, 5 aa, Homo sapiens
KFRFG

SEQ ID NO: 8702 - protein, 5 aa, Homo sapiens
LAERE

SEQ ID NO: 8703 - protein, 5 aa, Homo sapiens
FRSSV

SEQ ID NO: 8704 - protein, 5 aa, Homo sapiens
QLSIS

SEQ ID NO: 8705 - protein, 5 aa, Homo sapiens
AKPKV

SEQ ID NO: 8706 - protein, 5 aa, Homo sapiens
VIRSN

SEQ ID NO: 8707 - protein, 5 aa, Homo sapiens
YQRRM

SEQ ID NO: 8708 - protein, 5 aa, Homo sapiens
RLTQS

SEQ ID NO: 8709 - protein, 5 aa, Homo sapiens
RDVIG

SEQ ID NO: 8710 - protein, 5 aa, Homo sapiens
GHPLL

SEQ ID NO: 8711 - protein, 5 aa, Homo sapiens
ADVQA

SEQ ID NO: 8712 - protein, 5 aa, Homo sapiens
MWQEI

SEQ ID NO: 8713 - protein, 5 aa, Homo sapiens
LFENN

SEQ ID NO: 8714 - protein, 5 aa, Homo sapiens
KKKRD

SEQ ID NO: 8715 - protein, 5 aa, Homo sapiens
ARQAG

SEQ ID NO: 8716 - protein, 5 aa, Homo sapiens
AQGQE

SEQ ID NO: 8717 - protein, 5 aa, Homo sapiens
HPNEQ

SEQ ID NO: 8718 - protein, 5 aa, Homo sapiens
MRFDC

SEQ ID NO: 8719 - protein, 5 aa, Homo sapiens
VLTHQ

SEQ ID NO: 8720 - protein, 5 aa, Homo sapiens
YMYSS

SEQ ID NO: 8721 - protein, 5 aa, Homo sapiens
HVVLS

SEQ ID NO: 8722 - protein, 5 aa, Homo sapiens
HVISS

SEQ ID NO: 8723 - protein, 5 aa, Homo sapiens
KKLDL

SEQ ID NO: 8724 - protein, 5 aa, Homo sapiens
TQTAN

SEQ ID NO: 8725 - protein, 5 aa, Homo sapiens
HLKLY

SEQ ID NO: 8726 - protein, 5 aa, Homo sapiens
RAIFQ

SEQ ID NO: 8727 - protein, 5 aa, Homo sapiens
KPYSD

SEQ ID NO: 8728 - protein, 5 aa, Homo sapiens
DPSWN

SEQ ID NO: 8729 - protein, 5 aa, Homo sapiens
CRIWR

SEQ ID NO: 8730 - protein, 5 aa, Homo sapiens
PLRLQ

SEQ ID NO: 8731 - protein, 5 aa, Homo sapiens
VLKSC

SEQ ID NO: 8732 - protein, 5 aa, Homo sapiens
KGKRK

SEQ ID NO: 8733 - protein, 5 aa, Homo sapiens
IYLEP

SEQ ID NO: 8734 - protein, 5 aa, Homo sapiens
VLGAA

SEQ ID NO: 8735 - protein, 5 aa, Homo sapiens
ANAYK

SEQ ID NO: 8736 - protein, 5 aa, Homo sapiens
LQQAL

SEQ ID NO: 8737 - protein, 5 aa, Homo sapiens
YCFVI

SEQ ID NO: 8738 - protein, 5 aa, Homo sapiens
AAKGK

SEQ ID NO: 8739 - protein, 5 aa, Homo sapiens
PTNMS

SEQ ID NO: 8740 - protein, 5 aa, Homo sapiens
RFAMP

SEQ ID NO: 8741 - protein, 5 aa, Homo sapiens
EKKKR

SEQ ID NO: 8742 - protein, 5 aa, Homo sapiens
AKKDG

SEQ ID NO: 8743 - protein, 5 aa, Homo sapiens
TLAKP

SEQ ID NO: 8744 - protein, 5 aa, Homo sapiens
PNQYQ

SEQ ID NO: 8745 - protein, 5 aa, Homo sapiens
REAPF

SEQ ID NO: 8746 - protein, 5 aa, Homo sapiens
GLLEK

SEQ ID NO: 8747 - protein, 5 aa, Homo sapiens
WGPKR

SEQ ID NO: 8748 - protein, 5 aa, Homo sapiens
ETNIA

SEQ ID NO: 8749 - protein, 5 aa, Homo sapiens
QHETH

SEQ ID NO: 8750 - protein, 5 aa, Homo sapiens
TNPFL

SEQ ID NO: 8751 - protein, 5 aa, Homo sapiens
FGFRS

SEQ ID NO: 8752 - protein, 5 aa, Homo sapiens
IRLLA

SEQ ID NO: 8753 - protein, 5 aa, Homo sapiens
KAERE

SEQ ID NO: 8754 - protein, 5 aa, Homo sapiens
EEGEA

SEQ ID NO: 8755 - protein, 5 aa, Homo sapiens
SIKQY

SEQ ID NO: 8756 - protein, 5 aa, Homo sapiens
RRIVE

SEQ ID NO: 8757 - protein, 5 aa, Homo sapiens
ELSEH

SEQ ID NO: 8758 - protein, 5 aa, Homo sapiens
SATLG

SEQ ID NO: 8759 - protein, 5 aa, Homo sapiens
PIMHM

SEQ ID NO: 8760 - protein, 5 aa, Homo sapiens
FICSY

SEQ ID NO: 8761 - protein, 5 aa, Homo sapiens
SETIL

SEQ ID NO: 8762 - protein, 5 aa, Homo sapiens
CVVSQ

SEQ ID NO: 8763 - protein, 5 aa, Homo sapiens
SPKKV

SEQ ID NO: 8764 - protein, 5 aa, Homo sapiens
SSFFC

SEQ ID NO: 8765 - protein, 5 aa, Homo sapiens
VYDCN

SEQ ID NO: 8766 - protein, 5 aa, Homo sapiens
VHSSS

SEQ ID NO: 8767 - protein, 5 aa, Homo sapiens
YIFSV

SEQ ID NO: 8768 - protein, 5 aa, Homo sapiens
QRYSR

SEQ ID NO: 8769 - protein, 5 aa, Homo sapiens
ISRSC

SEQ ID NO: 8770 - protein, 5 aa, Homo sapiens
RNAKQ

SEQ ID NO: 8771 - protein, 5 aa, Homo sapiens
QLETD

SEQ ID NO: 8772 - protein, 5 aa, Homo sapiens
HLIEF

SEQ ID NO: 8773 - protein, 5 aa, Homo sapiens
PRPDY

SEQ ID NO: 8774 - protein, 5 aa, Homo sapiens
EDDRD

SEQ ID NO: 8775 - protein, 5 aa, Homo sapiens
PRAIY

SEQ ID NO: 8776 - protein, 5 aa, Homo sapiens
TADLA

SEQ ID NO: 8777 - protein, 5 aa, Homo sapiens
VHPHY

SEQ ID NO: 8778 - protein, 5 aa, Homo sapiens
SANGL

SEQ ID NO: 8779 - protein, 5 aa, Homo sapiens
DNGWD

SEQ ID NO: 8780 - protein, 5 aa, Homo sapiens
IDLSA

SEQ ID NO: 8781 - protein, 5 aa, Homo sapiens
ALNTN

SEQ ID NO: 8782 - protein, 5 aa, Homo sapiens
LLKVY

SEQ ID NO: 8783 - protein, 5 aa, Homo sapiens
KYCQS

SEQ ID NO: 8784 - protein, 5 aa, Homo sapiens
KLGAP

SEQ ID NO: 8785 - protein, 5 aa, Homo sapiens
LLTEK

SEQ ID NO: 8786 - protein, 5 aa, Homo sapiens
VLARP

SEQ ID NO: 8787 - protein, 5 aa, Homo sapiens
FVSDL

SEQ ID NO: 8788 - protein, 5 aa, Homo sapiens
QQLQH

SEQ ID NO: 8789 - protein, 5 aa, Homo sapiens
GGTFP

SEQ ID NO: 8790 - protein, 5 aa, Homo sapiens
GFSHN

SEQ ID NO: 8791 - protein, 5 aa, Homo sapiens
SRQPL

SEQ ID NO: 8792 - protein, 5 aa, Homo sapiens
SSDIC

SEQ ID NO: 8793 - protein, 5 aa, Homo sapiens
KKAKT

SEQ ID NO: 8794 - protein, 5 aa, Homo sapiens
YEIVI

SEQ ID NO: 8795 - protein, 5 aa, Homo sapiens
KEEDL

SEQ ID NO: 8796 - protein, 5 aa, Homo sapiens
RQSPP

SEQ ID NO: 8797 - protein, 5 aa, Homo sapiens
ASHPS

SEQ ID NO: 8798 - protein, 5 aa, Homo sapiens
APLTR

SEQ ID NO: 8799 - protein, 5 aa, Homo sapiens
IHKSL

SEQ ID NO: 8800 - protein, 5 aa, Homo sapiens
KKVTM

SEQ ID NO: 8801 - protein, 5 aa, Homo sapiens
PWGGH

SEQ ID NO: 8802 - protein, 5 aa, Homo sapiens
GRDSG

SEQ ID NO: 8803 - protein, 5 aa, Homo sapiens
SYKIE

SEQ ID NO: 8804 - protein, 5 aa, Homo sapiens
QEDDE

SEQ ID NO: 8805 - protein, 5 aa, Homo sapiens
VAQQQ

SEQ ID NO: 8806 - protein, 5 aa, Homo sapiens
PYVPP

SEQ ID NO: 8807 - protein, 5 aa, Homo sapiens
MEATD

SEQ ID NO: 8808 - protein, 5 aa, Homo sapiens
LNVYL

SEQ ID NO: 8809 - protein, 5 aa, Homo sapiens
VESWQ

SEQ ID NO: 8810 - protein, 5 aa, Homo sapiens
ILSYT

SEQ ID NO: 8811 - protein, 5 aa, Homo sapiens
KSQDF

SEQ ID NO: 8812 - protein, 5 aa, Homo sapiens
KAHES

SEQ ID NO: 8813 - protein, 5 aa, Homo sapiens
VLHTI

SEQ ID NO: 8814 - protein, 5 aa, Homo sapiens
GQYWV

SEQ ID NO: 8815 - protein, 5 aa, Homo sapiens
LQQKD

SEQ ID NO: 8816 - protein, 5 aa, Homo sapiens
EESVV

SEQ ID NO: 8817 - protein, 5 aa, Homo sapiens
YEVSI

SEQ ID NO: 8818 - protein, 5 aa, Homo sapiens
IAANS

SEQ ID NO: 8819 - protein, 5 aa, Homo sapiens
HKDDK

SEQ ID NO: 8820 - protein, 5 aa, Homo sapiens
FNDPY

SEQ ID NO: 8821 - protein, 5 aa, Homo sapiens
PYFEK

SEQ ID NO: 8822 - protein, 5 aa, Homo sapiens
QVTGD

SEQ ID NO: 8823 - protein, 5 aa, Homo sapiens
LDRTC

SEQ ID NO: 8824 - protein, 5 aa, Homo sapiens
EAQRG

SEQ ID NO: 8825 - protein, 5 aa, Homo sapiens
FRVKK

SEQ ID NO: 8826 - protein, 5 aa, Homo sapiens
VRPAC

SEQ ID NO: 8827 - protein, 5 aa, Homo sapiens
QQSLH

SEQ ID NO: 8828 - protein, 5 aa, Homo sapiens
LSPGC

SEQ ID NO: 8829 - protein, 5 aa, Homo sapiens
IARAD

SEQ ID NO: 8830 - protein, 5 aa, Homo sapiens
GHPPT

SEQ ID NO: 8831 - protein, 5 aa, Homo sapiens
RCVLS

SEQ ID NO: 8832 - protein, 5 aa, Homo sapiens
GSCGF

SEQ ID NO: 8833 - protein, 5 aa, Homo sapiens
EGAEA

SEQ ID NO: 8834 - protein, 5 aa, Homo sapiens
TEQLP

SEQ ID NO: 8835 - protein, 5 aa, Homo sapiens
QQHVV

SEQ ID NO: 8836 - protein, 5 aa, Homo sapiens
KAKKP

SEQ ID NO: 8837 - protein, 5 aa, Homo sapiens
PRLQC

SEQ ID NO: 8838 - protein, 5 aa, Homo sapiens
EDDMF

SEQ ID NO: 8839 - protein, 5 aa, Homo sapiens
QHPTT

SEQ ID NO: 8840 - protein, 5 aa, Homo sapiens
SLLEK

SEQ ID NO: 8841 - protein, 5 aa, Homo sapiens
CIALW

SEQ ID NO: 8842 - protein, 5 aa, Homo sapiens
RCSLL

SEQ ID NO: 8843 - protein, 5 aa, Homo sapiens
RMMSV

SEQ ID NO: 8844 - protein, 5 aa, Homo sapiens
PTREA

SEQ ID NO: 8845 - protein, 5 aa, Homo sapiens
EQDRP

SEQ ID NO: 8846 - protein, 5 aa, Homo sapiens
WSQQA

SEQ ID NO: 8847 - protein, 5 aa, Homo sapiens
FQNIC

SEQ ID NO: 8848 - protein, 5 aa, Homo sapiens
VHEVF

SEQ ID NO: 8849 - protein, 5 aa, Homo sapiens
GSLDG

SEQ ID NO: 8850 - protein, 5 aa, Homo sapiens
PPRLL

SEQ ID NO: 8851 - protein, 5 aa, Homo sapiens
IGLKP

SEQ ID NO: 8852 - protein, 5 aa, Homo sapiens
AALPQ

SEQ ID NO: 8853 - protein, 5 aa, Homo sapiens
TAASS

SEQ ID NO: 8854 - protein, 5 aa, Homo sapiens
RGSRM

SEQ ID NO: 8855 - protein, 5 aa, Homo sapiens
RLGES

SEQ ID NO: 8856 - protein, 5 aa, Homo sapiens
KLDLA

SEQ ID NO: 8857 - protein, 5 aa, Homo sapiens
LEIKH

SEQ ID NO: 8858 - protein, 5 aa, Homo sapiens
HNDWF

SEQ ID NO: 8859 - protein, 5 aa, Homo sapiens
ADKTA

SEQ ID NO: 8860 - protein, 5 aa, Homo sapiens
GDERI

SEQ ID NO: 8861 - protein, 5 aa, Homo sapiens
ILTVK

SEQ ID NO: 8862 - protein, 5 aa, Homo sapiens
LNRHR

SEQ ID NO: 8863 - protein, 5 aa, Homo sapiens
GGTNK

SEQ ID NO: 8864 - protein, 5 aa, Homo sapiens
NQQGA

SEQ ID NO: 8865 - protein, 5 aa, Homo sapiens
DPRPV

SEQ ID NO: 8866 - protein, 5 aa, Homo sapiens
KYLES

SEQ ID NO: 8867 - protein, 5 aa, Homo sapiens
DCGLF

SEQ ID NO: 8868 - protein, 5 aa, Homo sapiens
GVPTV

SEQ ID NO: 8869 - protein, 5 aa, Homo sapiens
IALTN

SEQ ID NO: 8870 - protein, 5 aa, Homo sapiens
YGGHR

SEQ ID NO: 8871 - protein, 5 aa, Homo sapiens
GGLAL

SEQ ID NO: 8872 - protein, 5 aa, Homo sapiens
FGTQA

SEQ ID NO: 8873 - protein, 5 aa, Homo sapiens
IRDLL

SEQ ID NO: 8874 - protein, 5 aa, Homo sapiens
ASQRR

SEQ ID NO: 8875 - protein, 5 aa, Homo sapiens
LQTEV

SEQ ID NO: 8876 - protein, 5 aa, Homo sapiens
ALLNV

SEQ ID NO: 8877 - protein, 5 aa, Homo sapiens
TSPLQ

SEQ ID NO: 8878 - protein, 5 aa, Homo sapiens
VGEKP

SEQ ID NO: 8879 - protein, 5 aa, Homo sapiens
NLRTT

SEQ ID NO: 8880 - protein, 5 aa, Homo sapiens
ADVFL

SEQ ID NO: 8881 - protein, 5 aa, Homo sapiens
PAVTV

SEQ ID NO: 8882 - protein, 5 aa, Homo sapiens
NTTRV

SEQ ID NO: 8883 - protein, 5 aa, Homo sapiens
GRRQI

SEQ ID NO: 8884 - protein, 5 aa, Homo sapiens
EKAVK

SEQ ID NO: 8885 - protein, 5 aa, Homo sapiens
VTSWM

SEQ ID NO: 8886 - protein, 5 aa, Homo sapiens
LQWLF

SEQ ID NO: 8887 - protein, 5 aa, Homo sapiens
VLLGI

SEQ ID NO: 8888 - protein, 5 aa, Homo sapiens
AEEEY

SEQ ID NO: 8889 - protein, 5 aa, Homo sapiens
RKNAV

SEQ ID NO: 8890 - protein, 5 aa, Homo sapiens
AADFP

SEQ ID NO: 8891 - protein, 5 aa, Homo sapiens
VHQLP

SEQ ID NO: 8892 - protein, 5 aa, Homo sapiens
SYKPY

SEQ ID NO: 8893 - protein, 5 aa, Homo sapiens
GMYGR

SEQ ID NO: 8894 - protein, 5 aa, Homo sapiens
QLSLE

SEQ ID NO: 8895 - protein, 5 aa, Homo sapiens
DYALV

SEQ ID NO: 8896 - protein, 5 aa, Homo sapiens
EELKE

SEQ ID NO: 8897 - protein, 5 aa, Homo sapiens
GGSCL

SEQ ID NO: 8898 - protein, 5 aa, Homo sapiens
KTSGH

SEQ ID NO: 8899 - protein, 5 aa, Homo sapiens
EHFQL

SEQ ID NO: 8900 - protein, 5 aa, Homo sapiens
YGFVS

SEQ ID NO: 8901 - protein, 5 aa, Homo sapiens
VEMLG

SEQ ID NO: 8902 - protein, 5 aa, Homo sapiens
LTPLL

SEQ ID NO: 8903 - protein, 5 aa, Homo sapiens
FFQFG

SEQ ID NO: 8904 - protein, 5 aa, Homo sapiens
LFGNP

SEQ ID NO: 8905 - protein, 5 aa, Homo sapiens
SAMGV

SEQ ID NO: 8906 - protein, 5 aa, Homo sapiens
RYPLI

SEQ ID NO: 8907 - protein, 5 aa, Homo sapiens
PAQEN

SEQ ID NO: 8908 - protein, 5 aa, Homo sapiens
KQSED

SEQ ID NO: 8909 - protein, 5 aa, Homo sapiens
SFSST

SEQ ID NO: 8910 - protein, 5 aa, Homo sapiens
EHGEN

SEQ ID NO: 8911 - protein, 5 aa, Homo sapiens
GKLSV

SEQ ID NO: 8912 - protein, 5 aa, Homo sapiens
LLKIP

SEQ ID NO: 8913 - protein, 5 aa, Homo sapiens
GLYTP

SEQ ID NO: 8914 - protein, 5 aa, Homo sapiens
TFFSL

SEQ ID NO: 8915 - protein, 5 aa, Homo sapiens
RSGTE

SEQ ID NO: 8916 - protein, 5 aa, Homo sapiens
GNPFA

SEQ ID NO: 8917 - protein, 5 aa, Homo sapiens
GRFLC

SEQ ID NO: 8918 - protein, 5 aa, Homo sapiens
TVYFW

SEQ ID NO: 8919 - protein, 5 aa, Homo sapiens
DEQDA

SEQ ID NO: 8920 - protein, 5 aa, Homo sapiens
EDCDT

SEQ ID NO: 8921 - protein, 5 aa, Homo sapiens
TWSTR

SEQ ID NO: 8922 - protein, 5 aa, Homo sapiens
WEPWM

SEQ ID NO: 8923 - protein, 5 aa, Homo sapiens
LPALL

SEQ ID NO: 8924 - protein, 5 aa, Homo sapiens
TTFEY

SEQ ID NO: 8925 - protein, 5 aa, Homo sapiens
AFTPG

SEQ ID NO: 8926 - protein, 5 aa, Homo sapiens
HTINI

SEQ ID NO: 8927 - protein, 5 aa, Homo sapiens
FLMPA

SEQ ID NO: 8928 - protein, 5 aa, Homo sapiens
SHDTD

SEQ ID NO: 8929 - protein, 5 aa, Homo sapiens
HNVKI

SEQ ID NO: 8930 - protein, 5 aa, Homo sapiens
LEGSC

SEQ ID NO: 8931 - protein, 5 aa, Homo sapiens
CGTSS

SEQ ID NO: 8932 - protein, 5 aa, Homo sapiens
PCLIS

SEQ ID NO: 8933 - protein, 5 aa, Homo sapiens
ADWLR

SEQ ID NO: 8934 - protein, 5 aa, Homo sapiens
LMSCL

SEQ ID NO: 8935 - protein, 5 aa, Homo sapiens
EPAEG

SEQ ID NO: 8936 - protein, 5 aa, Homo sapiens
AVRNP

SEQ ID NO: 8937 - protein, 5 aa, Homo sapiens
EADWS

SEQ ID NO: 8938 - protein, 5 aa, Homo sapiens
ILSLV

SEQ ID NO: 8939 - protein, 5 aa, Homo sapiens
AGKTV

SEQ ID NO: 8940 - protein, 5 aa, Homo sapiens
VGGVH

SEQ ID NO: 8941 - protein, 5 aa, Homo sapiens
SVRIF

SEQ ID NO: 8942 - protein, 5 aa, Homo sapiens
FCSIL

SEQ ID NO: 8943 - protein, 5 aa, Homo sapiens
CDPAL

SEQ ID NO: 8944 - protein, 5 aa, Homo sapiens
IAANP

SEQ ID NO: 8945 - protein, 5 aa, Homo sapiens
RVHTD

SEQ ID NO: 8946 - protein, 5 aa, Homo sapiens
SSLTI

SEQ ID NO: 8947 - protein, 5 aa, Homo sapiens
QRLRR

SEQ ID NO: 8948 - protein, 5 aa, Homo sapiens
IFNIF

SEQ ID NO: 8949 - protein, 5 aa, Homo sapiens
EGHHV

SEQ ID NO: 8950 - protein, 5 aa, Homo sapiens
SLLSW

SEQ ID NO: 8951 - protein, 5 aa, Homo sapiens
YINII

SEQ ID NO: 8952 - protein, 5 aa, Homo sapiens
FRKAS

SEQ ID NO: 8953 - protein, 5 aa, Homo sapiens
FQKYH

SEQ ID NO: 8954 - protein, 5 aa, Homo sapiens
ARSLS

SEQ ID NO: 8955 - protein, 5 aa, Homo sapiens
SRELW

SEQ ID NO: 8956 - protein, 5 aa, Homo sapiens
PEEPL

SEQ ID NO: 8957 - protein, 5 aa, Homo sapiens
ENKQN

SEQ ID NO: 8958 - protein, 5 aa, Homo sapiens
PTDAL

SEQ ID NO: 8959 - protein, 5 aa, Homo sapiens
PALYF

SEQ ID NO: 8960 - protein, 5 aa, Homo sapiens
RIQRS

SEQ ID NO: 8961 - protein, 5 aa, Homo sapiens
IDSEV

SEQ ID NO: 8962 - protein, 5 aa, Homo sapiens
TGGVY

SEQ ID NO: 8963 - protein, 5 aa, Homo sapiens
GGRDS

SEQ ID NO: 8964 - protein, 5 aa, Homo sapiens
LASSC

SEQ ID NO: 8965 - protein, 5 aa, Homo sapiens
NSHGL

SEQ ID NO: 8966 - protein, 5 aa, Homo sapiens
LNLTL

SEQ ID NO: 8967 - protein, 5 aa, Homo sapiens
HFQEP

SEQ ID NO: 8968 - protein, 5 aa, Homo sapiens
ETRAV

SEQ ID NO: 8969 - protein, 5 aa, Homo sapiens
EVLQE

SEQ ID NO: 8970 - protein, 5 aa, Homo sapiens
SSSLH

SEQ ID NO: 8971 - protein, 5 aa, Homo sapiens
RTGWS

SEQ ID NO: 8972 - protein, 5 aa, Homo sapiens
PYGRY

SEQ ID NO: 8973 - protein, 5 aa, Homo sapiens
SKEAP

SEQ ID NO: 8974 - protein, 5 aa, Homo sapiens
PRRRR

SEQ ID NO: 8975 - protein, 5 aa, Homo sapiens
APHTD

SEQ ID NO: 8976 - protein, 5 aa, Homo sapiens
RSQEP

SEQ ID NO: 8977 - protein, 5 aa, Homo sapiens
ISTTE

SEQ ID NO: 8978 - protein, 5 aa, Homo sapiens
LTIGA

SEQ ID NO: 8979 - protein, 5 aa, Homo sapiens
AEQRG

SEQ ID NO: 8980 - protein, 5 aa, Homo sapiens
AAETE

SEQ ID NO: 8981 - protein, 5 aa, Homo sapiens
AEEGD

SEQ ID NO: 8982 - protein, 5 aa, Homo sapiens
FNLIL

SEQ ID NO: 8983 - protein, 5 aa, Homo sapiens
KWVCW

SEQ ID NO: 8984 - protein, 5 aa, Homo sapiens
VRDTA

SEQ ID NO: 8985 - protein, 5 aa, Homo sapiens
VGIKK

SEQ ID NO: 8986 - protein, 5 aa, Homo sapiens
SILEC

SEQ ID NO: 8987 - protein, 5 aa, Homo sapiens
WLPRV

SEQ ID NO: 8988 - protein, 5 aa, Homo sapiens
STHLR

SEQ ID NO: 8989 - protein, 5 aa, Homo sapiens
LQSVA

SEQ ID NO: 8990 - protein, 5 aa, Homo sapiens
FRNQY

SEQ ID NO: 8991 - protein, 5 aa, Homo sapiens
PDMEA

SEQ ID NO: 8992 - protein, 5 aa, Homo sapiens
VKNCS

SEQ ID NO: 8993 - protein, 5 aa, Homo sapiens
EEVKE

SEQ ID NO: 8994 - protein, 5 aa, Homo sapiens
PKNCS

SEQ ID NO: 8995 - protein, 5 aa, Homo sapiens
KNFPV

SEQ ID NO: 8996 - protein, 5 aa, Homo sapiens
DQSTV

SEQ ID NO: 8997 - protein, 5 aa, Homo sapiens
CKLTV

SEQ ID NO: 8998 - protein, 5 aa, Homo sapiens
QCAHQ

SEQ ID NO: 8999 - protein, 5 aa, Homo sapiens
GQTNG

SEQ ID NO: 9000 - protein, 5 aa, Homo sapiens
QKLND

SEQ ID NO: 9001 - protein, 5 aa, Homo sapiens
NNHLL

SEQ ID NO: 9002 - protein, 5 aa, Homo sapiens
SRLGP

SEQ ID NO: 9003 - protein, 5 aa, Homo sapiens
QHTNV

SEQ ID NO: 9004 - protein, 5 aa, Homo sapiens
MKSNR

SEQ ID NO: 9005 - protein, 5 aa, Homo sapiens
RRIQQ

SEQ ID NO: 9006 - protein, 5 aa, Homo sapiens
SQLLS

SEQ ID NO: 9007 - protein, 5 aa, Homo sapiens
RFSPT

SEQ ID NO: 9008 - protein, 5 aa, Homo sapiens
FVRNP

SEQ ID NO: 9009 - protein, 5 aa, Homo sapiens
SQATP

SEQ ID NO: 9010 - protein, 5 aa, Homo sapiens
GEPGR

SEQ ID NO: 9011 - protein, 5 aa, Homo sapiens
CLYLA

SEQ ID NO: 9012 - protein, 5 aa, Homo sapiens
KKKPF

SEQ ID NO: 9013 - protein, 5 aa, Homo sapiens
AARTS

SEQ ID NO: 9014 - protein, 5 aa, Homo sapiens
GGRRR

SEQ ID NO: 9015 - protein, 5 aa, Homo sapiens
LLPER

SEQ ID NO: 9016 - protein, 5 aa, Homo sapiens
IVANP

SEQ ID NO: 9017 - protein, 5 aa, Homo sapiens
IPESY

SEQ ID NO: 9018 - protein, 5 aa, Homo sapiens
GEANN

SEQ ID NO: 9019 - protein, 5 aa, Homo sapiens
GHCAR

SEQ ID NO: 9020 - protein, 5 aa, Homo sapiens
RELMA

SEQ ID NO: 9021 - protein, 5 aa, Homo sapiens
NSIQI

SEQ ID NO: 9022 - protein, 5 aa, Homo sapiens
WIAAL

SEQ ID NO: 9023 - protein, 5 aa, Homo sapiens
KHKCN

SEQ ID NO: 9024 - protein, 5 aa, Homo sapiens
LSGGL

SEQ ID NO: 9025 - protein, 5 aa, Homo sapiens
AGQHW

SEQ ID NO: 9026 - protein, 5 aa, Homo sapiens
LPFFR

SEQ ID NO: 9027 - protein, 5 aa, Homo sapiens
LLRNM

SEQ ID NO: 9028 - protein, 5 aa, Homo sapiens
TCAKR

SEQ ID NO: 9029 - protein, 5 aa, Homo sapiens
IDMPD

SEQ ID NO: 9030 - protein, 5 aa, Homo sapiens
FSEYD

SEQ ID NO: 9031 - protein, 5 aa, Homo sapiens
ASDAN

SEQ ID NO: 9032 - protein, 5 aa, Homo sapiens
QVRIE

SEQ ID NO: 9033 - protein, 5 aa, Homo sapiens
PGGTL

SEQ ID NO: 9034 - protein, 5 aa, Homo sapiens
LRSQS

SEQ ID NO: 9035 - protein, 5 aa, Homo sapiens
LTWLL

SEQ ID NO: 9036 - protein, 5 aa, Homo sapiens
GRAKE

SEQ ID NO: 9037 - protein, 5 aa, Homo sapiens
ITVKQ

SEQ ID NO: 9038 - protein, 5 aa, Homo sapiens
VEPLG

SEQ ID NO: 9039 - protein, 5 aa, Homo sapiens
GDGDH

SEQ ID NO: 9040 - protein, 5 aa, Homo sapiens
RVHEN

SEQ ID NO: 9041 - protein, 5 aa, Homo sapiens
RAAFQ

SEQ ID NO: 9042 - protein, 5 aa, Homo sapiens
SILKN

SEQ ID NO: 9043 - protein, 5 aa, Homo sapiens
LLYSH

SEQ ID NO: 9044 - protein, 5 aa, Homo sapiens
GNCTS

SEQ ID NO: 9045 - protein, 5 aa, Homo sapiens
SLPRV

SEQ ID NO: 9046 - protein, 5 aa, Homo sapiens
HSPVG

SEQ ID NO: 9047 - protein, 5 aa, Homo sapiens
KCCIF

SEQ ID NO: 9048 - protein, 5 aa, Homo sapiens
ESRRP

SEQ ID NO: 9049 - protein, 5 aa, Homo sapiens
LVSCL

SEQ ID NO: 9050 - protein, 5 aa, Homo sapiens
ELDMD

SEQ ID NO: 9051 - protein, 5 aa, Homo sapiens
SATHW

SEQ ID NO: 9052 - protein, 5 aa, Homo sapiens
QRFLI

SEQ ID NO: 9053 - protein, 5 aa, Homo sapiens
DVDFF

SEQ ID NO: 9054 - protein, 5 aa, Homo sapiens
CMKSL

SEQ ID NO: 9055 - protein, 5 aa, Homo sapiens
SRPLF

SEQ ID NO: 9056 - protein, 5 aa, Homo sapiens
DMVSS

SEQ ID NO: 9057 - protein, 5 aa, Homo sapiens
TSAKE

SEQ ID NO: 9058 - protein, 5 aa, Homo sapiens
MRKKS

SEQ ID NO: 9059 - protein, 5 aa, Homo sapiens
LWRRQ

SEQ ID NO: 9060 - protein, 5 aa, Homo sapiens
NWLVW

SEQ ID NO: 9061 - protein, 5 aa, Homo sapiens
AQQET

SEQ ID NO: 9062 - protein, 5 aa, Homo sapiens
MLTDV

SEQ ID NO: 9063 - protein, 5 aa, Homo sapiens
LPREG

SEQ ID NO: 9064 - protein, 5 aa, Homo sapiens
FSHAK

SEQ ID NO: 9065 - protein, 5 aa, Homo sapiens
IFFLD

SEQ ID NO: 9066 - protein, 5 aa, Homo sapiens
QGLVC

SEQ ID NO: 9067 - protein, 5 aa, Homo sapiens
RILNV

SEQ ID NO: 9068 - protein, 5 aa, Homo sapiens
KQEQP

SEQ ID NO: 9069 - protein, 5 aa, Homo sapiens
RRLSP

SEQ ID NO: 9070 - protein, 5 aa, Homo sapiens
LHNEL

SEQ ID NO: 9071 - protein, 5 aa, Homo sapiens
SQIEC

SEQ ID NO: 9072 - protein, 5 aa, Homo sapiens
DNQNW

SEQ ID NO: 9073 - protein, 5 aa, Homo sapiens
NDSSP

SEQ ID NO: 9074 - protein, 5 aa, Homo sapiens
QSGGR

SEQ ID NO: 9075 - protein, 5 aa, Homo sapiens
SWQQW

SEQ ID NO: 9076 - protein, 5 aa, Homo sapiens
CYGGL

SEQ ID NO: 9077 - protein, 5 aa, Homo sapiens
RETAS

SEQ ID NO: 9078 - protein, 5 aa, Homo sapiens
GWSCR

SEQ ID NO: 9079 - protein, 5 aa, Homo sapiens
EAGQA

SEQ ID NO: 9080 - protein, 5 aa, Homo sapiens
EDSNV

SEQ ID NO: 9081 - protein, 5 aa, Homo sapiens
RQRSK

SEQ ID NO: 9082 - protein, 5 aa, Homo sapiens
NKVAA

SEQ ID NO: 9083 - protein, 5 aa, Homo sapiens
WRPWP

SEQ ID NO: 9084 - protein, 5 aa, Homo sapiens
MYTCS

SEQ ID NO: 9085 - protein, 5 aa, Homo sapiens
SRTSP

SEQ ID NO: 9086 - protein, 5 aa, Homo sapiens
TMKRN

SEQ ID NO: 9087 - protein, 5 aa, Homo sapiens
FLFDL

SEQ ID NO: 9088 - protein, 5 aa, Homo sapiens
DFYIL

SEQ ID NO: 9089 - protein, 5 aa, Homo sapiens
EPIGN

SEQ ID NO: 9090 - protein, 5 aa, Homo sapiens
GEEEE

SEQ ID NO: 9091 - protein, 5 aa, Homo sapiens
PGVLT

SEQ ID NO: 9092 - protein, 5 aa, Homo sapiens
FHISL

SEQ ID NO: 9093 - protein, 5 aa, Homo sapiens
QEPLD

SEQ ID NO: 9094 - protein, 5 aa, Homo sapiens
ASYLL

SEQ ID NO: 9095 - protein, 5 aa, Homo sapiens
SSLVG

SEQ ID NO: 9096 - protein, 5 aa, Homo sapiens
SLCLF

SEQ ID NO: 9097 - protein, 5 aa, Homo sapiens
RQVRG

SEQ ID NO: 9098 - protein, 5 aa, Homo sapiens
YCFDI

SEQ ID NO: 9099 - protein, 5 aa, Homo sapiens
RPADF

SEQ ID NO: 9100 - protein, 5 aa, Homo sapiens
SYYMW

SEQ ID NO: 9101 - protein, 5 aa, Homo sapiens
GGEEI

SEQ ID NO: 9102 - protein, 5 aa, Homo sapiens
AEPHL

SEQ ID NO: 9103 - protein, 5 aa, Homo sapiens
QARQN

SEQ ID NO: 9104 - protein, 5 aa, Homo sapiens
VVGPY

SEQ ID NO: 9105 - protein, 5 aa, Homo sapiens
SDEEN

SEQ ID NO: 9106 - protein, 5 aa, Homo sapiens
LDGKN

SEQ ID NO: 9107 - protein, 5 aa, Homo sapiens
RGLKM

SEQ ID NO: 9108 - protein, 5 aa, Homo sapiens
ITVDD

SEQ ID NO: 9109 - protein, 5 aa, Homo sapiens
VQMEN

SEQ ID NO: 9110 - protein, 5 aa, Homo sapiens
VLFEK

SEQ ID NO: 9111 - protein, 5 aa, Homo sapiens
ASGRI

SEQ ID NO: 9112 - protein, 5 aa, Homo sapiens
NTVCA

SEQ ID NO: 9113 - protein, 5 aa, Homo sapiens
GAQSI

SEQ ID NO: 9114 - protein, 5 aa, Homo sapiens
KDSMN

SEQ ID NO: 9115 - protein, 5 aa, Homo sapiens
PRAKL

SEQ ID NO: 9116 - protein, 5 aa, Homo sapiens
EKEDA

SEQ ID NO: 9117 - protein, 5 aa, Homo sapiens
FTLVA

SEQ ID NO: 9118 - protein, 5 aa, Homo sapiens
GTYLY

SEQ ID NO: 9119 - protein, 5 aa, Homo sapiens
SSVKF

SEQ ID NO: 9120 - protein, 5 aa, Homo sapiens
SLCLF

SEQ ID NO: 9121 - protein, 5 aa, Homo sapiens
ISVST

SEQ ID NO: 9122 - protein, 5 aa, Homo sapiens
AALSL

SEQ ID NO: 9123 - protein, 5 aa, Homo sapiens
GIHLW

SEQ ID NO: 9124 - protein, 5 aa, Homo sapiens
KSEWV

SEQ ID NO: 9125 - protein, 5 aa, Homo sapiens
AQAPS

SEQ ID NO: 9126 - protein, 5 aa, Homo sapiens
EPISN

SEQ ID NO: 9127 - protein, 5 aa, Homo sapiens
VTPQN

SEQ ID NO: 9128 - protein, 5 aa, Homo sapiens
PEEAE

SEQ ID NO: 9129 - protein, 5 aa, Homo sapiens
PRRRK

SEQ ID NO: 9130 - protein, 5 aa, Homo sapiens
WVDPS

SEQ ID NO: 9131 - protein, 5 aa, Homo sapiens
KHREE

SEQ ID NO: 9132 - protein, 5 aa, Homo sapiens
QPVYL

SEQ ID NO: 9133 - protein, 5 aa, Homo sapiens
FLGLP

SEQ ID NO: 9134 - protein, 5 aa, Homo sapiens
TMETE

SEQ ID NO: 9135 - protein, 5 aa, Homo sapiens
PMPTT

SEQ ID NO: 9136 - protein, 5 aa, Homo sapiens
QTCYP

SEQ ID NO: 9137 - protein, 5 aa, Homo sapiens
NSISI

SEQ ID NO: 9138 - protein, 5 aa, Homo sapiens
DQPGK

SEQ ID NO: 9139 - protein, 5 aa, Homo sapiens
QTPNN

SEQ ID NO: 9140 - protein, 5 aa, Homo sapiens
FHLGL

SEQ ID NO: 9141 - protein, 5 aa, Homo sapiens
ERGSA

SEQ ID NO: 9142 - protein, 5 aa, Homo sapiens
NYLNK

SEQ ID NO: 9143 - protein, 5 aa, Homo sapiens
VPRKA

SEQ ID NO: 9144 - protein, 5 aa, Homo sapiens
NYQYR

SEQ ID NO: 9145 - protein, 5 aa, Homo sapiens
HPIYI

SEQ ID NO: 9146 - protein, 5 aa, Homo sapiens
CRVAC

SEQ ID NO: 9147 - protein, 5 aa, Homo sapiens
ATASN

SEQ ID NO: 9148 - protein, 5 aa, Homo sapiens
CPASR

SEQ ID NO: 9149 - protein, 5 aa, Homo sapiens
RVRQS

SEQ ID NO: 9150 - protein, 5 aa, Homo sapiens
YTIEI

SEQ ID NO: 9151 - protein, 5 aa, Homo sapiens
LNYKV

SEQ ID NO: 9152 - protein, 5 aa, Homo sapiens
PTDHL

SEQ ID NO: 9153 - protein, 5 aa, Homo sapiens
SFCFK

SEQ ID NO: 9154 - protein, 5 aa, Homo sapiens
THLHG

SEQ ID NO: 9155 - protein, 5 aa, Homo sapiens
VLVSK

SEQ ID NO: 9156 - protein, 5 aa, Homo sapiens
PPPQQ

SEQ ID NO: 9157 - protein, 5 aa, Homo sapiens
EPMEH

SEQ ID NO: 9158 - protein, 5 aa, Homo sapiens
TIWIQ

SEQ ID NO: 9159 - protein, 5 aa, Homo sapiens
SSCPL

SEQ ID NO: 9160 - protein, 5 aa, Homo sapiens
TLNWP

SEQ ID NO: 9161 - protein, 5 aa, Homo sapiens
LPSQA

SEQ ID NO: 9162 - protein, 5 aa, Homo sapiens
AWCLM

SEQ ID NO: 9163 - protein, 5 aa, Homo sapiens
KHSSK

SEQ ID NO: 9164 - protein, 5 aa, Homo sapiens
AKSTL

SEQ ID NO: 9165 - protein, 5 aa, Homo sapiens
YECGQ

SEQ ID NO: 9166 - protein, 5 aa, Homo sapiens
LESTD

SEQ ID NO: 9167 - protein, 5 aa, Homo sapiens
QELSH

SEQ ID NO: 9168 - protein, 5 aa, Homo sapiens
SREEL

SEQ ID NO: 9169 - protein, 5 aa, Homo sapiens
GGGAH

SEQ ID NO: 9170 - protein, 5 aa, Homo sapiens
NIQFN

SEQ ID NO: 9171 - protein, 5 aa, Homo sapiens
LSPSF

SEQ ID NO: 9172 - protein, 5 aa, Homo sapiens
HPVLW

SEQ ID NO: 9173 - protein, 5 aa, Homo sapiens
ISWAM

SEQ ID NO: 9174 - protein, 5 aa, Homo sapiens
SYTLV

SEQ ID NO: 9175 - protein, 5 aa, Homo sapiens
KFYSS

SEQ ID NO: 9176 - protein, 5 aa, Homo sapiens
ILLGD

SEQ ID NO: 9177 - protein, 5 aa, Homo sapiens
AAALW

SEQ ID NO: 9178 - protein, 5 aa, Homo sapiens
GPPWP

SEQ ID NO: 9179 - protein, 5 aa, Homo sapiens
QKFRL

SEQ ID NO: 9180 - protein, 5 aa, Homo sapiens
RTHSG

SEQ ID NO: 9181 - protein, 5 aa, Homo sapiens
GAAIF

SEQ ID NO: 9182 - protein, 5 aa, Homo sapiens
SLTGR

SEQ ID NO: 9183 - protein, 5 aa, Homo sapiens
DPNYD

SEQ ID NO: 9184 - protein, 5 aa, Homo sapiens
FSQGQ

SEQ ID NO: 9185 - protein, 5 aa, Homo sapiens
THVQT

SEQ ID NO: 9186 - protein, 5 aa, Homo sapiens
PDEKP

SEQ ID NO: 9187 - protein, 5 aa, Homo sapiens
DSSTS

SEQ ID NO: 9188 - protein, 5 aa, Homo sapiens
ATQFP

SEQ ID NO: 9189 - protein, 5 aa, Homo sapiens
AREDA

SEQ ID NO: 9190 - protein, 5 aa, Homo sapiens
NNLLQ

SEQ ID NO: 9191 - protein, 5 aa, Homo sapiens
GTKAL

SEQ ID NO: 9192 - protein, 5 aa, Homo sapiens
KKTTE

SEQ ID NO: 9193 - protein, 5 aa, Homo sapiens
ARELI

SEQ ID NO: 9194 - protein, 5 aa, Homo sapiens
DEIWL

SEQ ID NO: 9195 - protein, 5 aa, Homo sapiens
PPFSE

SEQ ID NO: 9196 - protein, 5 aa, Homo sapiens
MEMAV

SEQ ID NO: 9197 - protein, 5 aa, Homo sapiens
SRASC

SEQ ID NO: 9198 - protein, 5 aa, Homo sapiens
VRAGR

SEQ ID NO: 9199 - protein, 5 aa, Homo sapiens
SRSLV

SEQ ID NO: 9200 - protein, 5 aa, Homo sapiens
KKPFQ

SEQ ID NO: 9201 - protein, 5 aa, Homo sapiens
PGDAC

SEQ ID NO: 9202 - protein, 5 aa, Homo sapiens
KKFKK

SEQ ID NO: 9203 - protein, 5 aa, Homo sapiens
LTIPA

SEQ ID NO: 9204 - protein, 5 aa, Homo sapiens
KKVTP

SEQ ID NO: 9205 - protein, 5 aa, Homo sapiens
FVWTE

SEQ ID NO: 9206 - protein, 5 aa, Homo sapiens
HRISA

SEQ ID NO: 9207 - protein, 5 aa, Homo sapiens
ESLDP

SEQ ID NO: 9208 - protein, 5 aa, Homo sapiens
GESEA

SEQ ID NO: 9209 - protein, 5 aa, Homo sapiens
RIKVM

SEQ ID NO: 9210 - protein, 5 aa, Homo sapiens
WMSKS

SEQ ID NO: 9211 - protein, 5 aa, Homo sapiens
EVGTD

SEQ ID NO: 9212 - protein, 5 aa, Homo sapiens
LCFPS

SEQ ID NO: 9213 - protein, 5 aa, Homo sapiens
GMKRV

SEQ ID NO: 9214 - protein, 5 aa, Homo sapiens
VAQSF

SEQ ID NO: 9215 - protein, 5 aa, Homo sapiens
KVHQD

SEQ ID NO: 9216 - protein, 5 aa, Homo sapiens
MPSDF

SEQ ID NO: 9217 - protein, 5 aa, Homo sapiens
DYLYR

SEQ ID NO: 9218 - protein, 5 aa, Homo sapiens
KRLRL

SEQ ID NO: 9219 - protein, 5 aa, Homo sapiens
QKRIR

SEQ ID NO: 9220 - protein, 5 aa, Homo sapiens
TWRIS

SEQ ID NO: 9221 - protein, 5 aa, Homo sapiens
WHLEG

SEQ ID NO: 9222 - protein, 5 aa, Homo sapiens
PGHVD

SEQ ID NO: 9223 - protein, 5 aa, Homo sapiens
SNSSR

SEQ ID NO: 9224 - protein, 5 aa, Homo sapiens
KGERD

SEQ ID NO: 9225 - protein, 5 aa, Homo sapiens
CSLWR

SEQ ID NO: 9226 - protein, 5 aa, Homo sapiens
ELLTS

SEQ ID NO: 9227 - protein, 5 aa, Homo sapiens
PYDGV

SEQ ID NO: 9228 - protein, 5 aa, Homo sapiens
SSELT

SEQ ID NO: 9229 - protein, 5 aa, Homo sapiens
GAKQP

SEQ ID NO: 9230 - protein, 5 aa, Homo sapiens
NYYRY

SEQ ID NO: 9231 - protein, 5 aa, Homo sapiens
SGLLC

SEQ ID NO: 9232 - protein, 5 aa, Homo sapiens
SEATK

SEQ ID NO: 9233 - protein, 5 aa, Homo sapiens
EGLTN

SEQ ID NO: 9234 - protein, 5 aa, Homo sapiens
KILEC

SEQ ID NO: 9235 - protein, 5 aa, Homo sapiens
IMNSS

SEQ ID NO: 9236 - protein, 5 aa, Homo sapiens
VLKVN

SEQ ID NO: 9237 - protein, 5 aa, Homo sapiens
FFVCC

SEQ ID NO: 9238 - protein, 5 aa, Homo sapiens
KISWK

SEQ ID NO: 9239 - protein, 5 aa, Homo sapiens
WRCHF

SEQ ID NO: 9240 - protein, 5 aa, Homo sapiens
SAVTS

SEQ ID NO: 9241 - protein, 5 aa, Homo sapiens
LRDEH

SEQ ID NO: 9242 - protein, 5 aa, Homo sapiens
RTGGN

SEQ ID NO: 9243 - protein, 5 aa, Homo sapiens
AVGSL

SEQ ID NO: 9244 - protein, 5 aa, Homo sapiens
GGSSF

SEQ ID NO: 9245 - protein, 5 aa, Homo sapiens
WMDSK

SEQ ID NO: 9246 - protein, 5 aa, Homo sapiens
FVDVM

SEQ ID NO: 9247 - protein, 5 aa, Homo sapiens
GSPEL

SEQ ID NO: 9248 - protein, 5 aa, Homo sapiens
KGTVA

SEQ ID NO: 9249 - protein, 5 aa, Homo sapiens
REGSA

SEQ ID NO: 9250 - protein, 5 aa, Homo sapiens
LPQAR

SEQ ID NO: 9251 - protein, 5 aa, Homo sapiens
KGTLE

SEQ ID NO: 9252 - protein, 5 aa, Homo sapiens
EPKKK

SEQ ID NO: 9253 - protein, 5 aa, Homo sapiens
IRTHK

SEQ ID NO: 9254 - protein, 5 aa, Homo sapiens
VPTWL

SEQ ID NO: 9255 - protein, 5 aa, Homo sapiens
RRGRR

SEQ ID NO: 9256 - protein, 5 aa, Homo sapiens
DDTKM

SEQ ID NO: 9257 - protein, 5 aa, Homo sapiens
EIHPG

SEQ ID NO: 9258 - protein, 5 aa, Homo sapiens
GERFC

SEQ ID NO: 9259 - protein, 5 aa, Homo sapiens
PLYYI

SEQ ID NO: 9260 - protein, 5 aa, Homo sapiens
RAAFI

SEQ ID NO: 9261 - protein, 5 aa, Homo sapiens
AMNNI

SEQ ID NO: 9262 - protein, 5 aa, Homo sapiens
RWGKN

SEQ ID NO: 9263 - protein, 5 aa, Homo sapiens
KSKRS

SEQ ID NO: 9264 - protein, 5 aa, Homo sapiens
TTPSP

SEQ ID NO: 9265 - protein, 5 aa, Homo sapiens
AGTPK

SEQ ID NO: 9266 - protein, 5 aa, Homo sapiens
ECETI

SEQ ID NO: 9267 - protein, 5 aa, Homo sapiens
KLSAT

SEQ ID NO: 9268 - protein, 5 aa, Homo sapiens
RPFQR

SEQ ID NO: 9269 - protein, 5 aa, Homo sapiens
KFCRQ

SEQ ID NO: 9270 - protein, 5 aa, Homo sapiens
RSSST

SEQ ID NO: 9271 - protein, 5 aa, Homo sapiens
AARSP

SEQ ID NO: 9272 - protein, 5 aa, Homo sapiens
LSDED

SEQ ID NO: 9273 - protein, 5 aa, Homo sapiens
LRQMC

SEQ ID NO: 9274 - protein, 5 aa, Homo sapiens
QRVVY

SEQ ID NO: 9275 - protein, 5 aa, Homo sapiens
RVSHA

SEQ ID NO: 9276 - protein, 5 aa, Homo sapiens
GDSSA

SEQ ID NO: 9277 - protein, 5 aa, Homo sapiens
TLAGR

SEQ ID NO: 9278 - protein, 5 aa, Homo sapiens
QTKDQ

SEQ ID NO: 9279 - protein, 5 aa, Homo sapiens
AQTRL

SEQ ID NO: 9280 - protein, 5 aa, Homo sapiens
FDIHL

SEQ ID NO: 9281 - protein, 5 aa, Homo sapiens
AGQLI

SEQ ID NO: 9282 - protein, 5 aa, Homo sapiens
KKSGG

SEQ ID NO: 9283 - protein, 5 aa, Homo sapiens
LWRRQ

SEQ ID NO: 9284 - protein, 5 aa, Homo sapiens
QFLCA

SEQ ID NO: 9285 - protein, 5 aa, Homo sapiens
FFFFF

SEQ ID NO: 9286 - protein, 5 aa, Homo sapiens
NQEKG

SEQ ID NO: 9287 - protein, 5 aa, Homo sapiens
NIVFN

SEQ ID NO: 9288 - protein, 5 aa, Homo sapiens
GSKAT

SEQ ID NO: 9289 - protein, 5 aa, Homo sapiens
ARGTP

SEQ ID NO: 9290 - protein, 5 aa, Homo sapiens
CGRPS

SEQ ID NO: 9291 - protein, 5 aa, Homo sapiens
EMVLE

SEQ ID NO: 9292 - protein, 5 aa, Homo sapiens
KGQLS

SEQ ID NO: 9293 - protein, 5 aa, Homo sapiens
FSAMS

SEQ ID NO: 9294 - protein, 5 aa, Homo sapiens
ADEGC

SEQ ID NO: 9295 - protein, 5 aa, Homo sapiens
CFSYG

SEQ ID NO: 9296 - protein, 5 aa, Homo sapiens
ALEHF

SEQ ID NO: 9297 - protein, 5 aa, Homo sapiens
NSSSN

SEQ ID NO: 9298 - protein, 5 aa, Homo sapiens
QLLKD

SEQ ID NO: 9299 - protein, 5 aa, Homo sapiens
PPPRR

SEQ ID NO: 9300 - protein, 5 aa, Homo sapiens
IKEIA

SEQ ID NO: 9301 - protein, 5 aa, Homo sapiens
SRGNR

SEQ ID NO: 9302 - protein, 5 aa, Homo sapiens
DLFDA

SEQ ID NO: 9303 - protein, 5 aa, Homo sapiens
QTKTP

SEQ ID NO: 9304 - protein, 5 aa, Homo sapiens
PGEDA

SEQ ID NO: 9305 - protein, 5 aa, Homo sapiens
KKQKL

SEQ ID NO: 9306 - protein, 5 aa, Homo sapiens
DDYLH

SEQ ID NO: 9307 - protein, 5 aa, Homo sapiens
LPILH

SEQ ID NO: 9308 - protein, 5 aa, Homo sapiens
VQFFM

SEQ ID NO: 9309 - protein, 5 aa, Homo sapiens
KLFPG

SEQ ID NO: 9310 - protein, 5 aa, Homo sapiens
EKAKQ

SEQ ID NO: 9311 - protein, 5 aa, Homo sapiens
LDMND

SEQ ID NO: 9312 - protein, 5 aa, Homo sapiens
RGWAG

SEQ ID NO: 9313 - protein, 5 aa, Homo sapiens
VISCG

SEQ ID NO: 9314 - protein, 5 aa, Homo sapiens
VLLEA

SEQ ID NO: 9315 - protein, 5 aa, Homo sapiens
LQWGI

SEQ ID NO: 9316 - protein, 5 aa, Homo sapiens
EDFAA

SEQ ID NO: 9317 - protein, 5 aa, Homo sapiens
SRGLS

SEQ ID NO: 9318 - protein, 5 aa, Homo sapiens
ASSNT

SEQ ID NO: 9319 - protein, 5 aa, Homo sapiens
CPDIY

SEQ ID NO: 9320 - protein, 5 aa, Homo sapiens
FLQGF

SEQ ID NO: 9321 - protein, 5 aa, Homo sapiens
SSTVN

SEQ ID NO: 9322 - protein, 5 aa, Homo sapiens
RLRKR

SEQ ID NO: 9323 - protein, 5 aa, Homo sapiens
NPKAV

SEQ ID NO: 9324 - protein, 5 aa, Homo sapiens
YRKCY

SEQ ID NO: 9325 - protein, 5 aa, Homo sapiens
PLGVR

SEQ ID NO: 9326 - protein, 5 aa, Homo sapiens
LFRRS

SEQ ID NO: 9327 - protein, 5 aa, Homo sapiens
NKPVF

SEQ ID NO: 9328 - protein, 5 aa, Homo sapiens
CCSII

SEQ ID NO: 9329 - protein, 5 aa, Homo sapiens
SGGCC

SEQ ID NO: 9330 - protein, 5 aa, Homo sapiens
SIKEK

SEQ ID NO: 9331 - protein, 5 aa, Homo sapiens
MLQII

SEQ ID NO: 9332 - protein, 5 aa, Homo sapiens
SGAVW

SEQ ID NO: 9333 - protein, 5 aa, Homo sapiens
LNSLI

SEQ ID NO: 9334 - protein, 5 aa, Homo sapiens
LIFLF

SEQ ID NO: 9335 - protein, 5 aa, Homo sapiens
QPEFV

SEQ ID NO: 9336 - protein, 5 aa, Homo sapiens
ETPRE

SEQ ID NO: 9337 - protein, 5 aa, Homo sapiens
TERVP

SEQ ID NO: 9338 - protein, 5 aa, Homo sapiens
VIFPH

SEQ ID NO: 9339 - protein, 5 aa, Homo sapiens
PAVAR

SEQ ID NO: 9340 - protein, 5 aa, Homo sapiens
IQACQ

SEQ ID NO: 9341 - protein, 5 aa, Homo sapiens
MTADD

SEQ ID NO: 9342 - protein, 5 aa, Homo sapiens
TDAGV

SEQ ID NO: 9343 - protein, 5 aa, Homo sapiens
EPLEL

SEQ ID NO: 9344 - protein, 5 aa, Homo sapiens
APFRK

SEQ ID NO: 9345 - protein, 5 aa, Homo sapiens
YLGLE

SEQ ID NO: 9346 - protein, 5 aa, Homo sapiens
LNSYT

SEQ ID NO: 9347 - protein, 5 aa, Homo sapiens
PKDEL

SEQ ID NO: 9348 - protein, 5 aa, Homo sapiens
YYPGP

SEQ ID NO: 9349 - protein, 5 aa, Homo sapiens
DSELI

SEQ ID NO: 9350 - protein, 5 aa, Homo sapiens
FNKGL

SEQ ID NO: 9351 - protein, 5 aa, Homo sapiens
FSTIS

SEQ ID NO: 9352 - protein, 5 aa, Homo sapiens
QAAAK

SEQ ID NO: 9353 - protein, 5 aa, Homo sapiens
QSSHA

SEQ ID NO: 9354 - protein, 5 aa, Homo sapiens
LKFHR

SEQ ID NO: 9355 - protein, 5 aa, Homo sapiens
ILIFF

SEQ ID NO: 9356 - protein, 5 aa, Homo sapiens
LLKKK

SEQ ID NO: 9357 - protein, 5 aa, Homo sapiens
LDRNA

SEQ ID NO: 9358 - protein, 5 aa, Homo sapiens
FKKCP

SEQ ID NO: 9359 - protein, 5 aa, Homo sapiens
FRHCS

SEQ ID NO: 9360 - protein, 5 aa, Homo sapiens
QPTTL

SEQ ID NO: 9361 - protein, 5 aa, Homo sapiens
TQVLM

SEQ ID NO: 9362 - protein, 5 aa, Homo sapiens
ALEGR

SEQ ID NO: 9363 - protein, 5 aa, Homo sapiens
FLLQH

SEQ ID NO: 9364 - protein, 5 aa, Homo sapiens
LTTTS

SEQ ID NO: 9365 - protein, 5 aa, Homo sapiens
PRRRR

SEQ ID NO: 9366 - protein, 5 aa, Homo sapiens
RLCPA

SEQ ID NO: 9367 - protein, 5 aa, Homo sapiens
KRLNK

SEQ ID NO: 9368 - protein, 5 aa, Homo sapiens
SGPTA

SEQ ID NO: 9369 - protein, 5 aa, Homo sapiens
CCAPW

SEQ ID NO: 9370 - protein, 5 aa, Homo sapiens
VWLHY

SEQ ID NO: 9371 - protein, 5 aa, Homo sapiens
DKSHS

SEQ ID NO: 9372 - protein, 5 aa, Homo sapiens
FSSCK

SEQ ID NO: 9373 - protein, 5 aa, Homo sapiens
GVGGA

SEQ ID NO: 9374 - protein, 5 aa, Homo sapiens
LEGEL

SEQ ID NO: 9375 - protein, 5 aa, Homo sapiens
DSDSD

SEQ ID NO: 9376 - protein, 5 aa, Homo sapiens
IGEKS

SEQ ID NO: 9377 - protein, 5 aa, Homo sapiens
CYSEA

SEQ ID NO: 9378 - protein, 5 aa, Homo sapiens
VFCRE

SEQ ID NO: 9379 - protein, 5 aa, Homo sapiens
KSPHT

SEQ ID NO: 9380 - protein, 5 aa, Homo sapiens
QKMKT

SEQ ID NO: 9381 - protein, 5 aa, Homo sapiens
RCGCI

SEQ ID NO: 9382 - protein, 5 aa, Homo sapiens
ALGKN

SEQ ID NO: 9383 - protein, 5 aa, Homo sapiens
YRPPK

SEQ ID NO: 9384 - protein, 5 aa, Homo sapiens
CKLSS

SEQ ID NO: 9385 - protein, 5 aa, Homo sapiens
NNKNH

SEQ ID NO: 9386 - protein, 5 aa, Homo sapiens
QPGAP

SEQ ID NO: 9387 - protein, 5 aa, Homo sapiens
SRTIG

SEQ ID NO: 9388 - protein, 5 aa, Homo sapiens
SESQT

SEQ ID NO: 9389 - protein, 5 aa, Homo sapiens
DMFKN

SEQ ID NO: 9390 - protein, 5 aa, Homo sapiens
DLTEL

SEQ ID NO: 9391 - protein, 5 aa, Homo sapiens
KTSTI

SEQ ID NO: 9392 - protein, 5 aa, Homo sapiens
VHEEL

SEQ ID NO: 9393 - protein, 5 aa, Homo sapiens
GKMRS

SEQ ID NO: 9394 - protein, 5 aa, Homo sapiens
ARDCP

SEQ ID NO: 9395 - protein, 5 aa, Homo sapiens
QAPQA

SEQ ID NO: 9396 - protein, 5 aa, Homo sapiens
AKSLQ

SEQ ID NO: 9397 - protein, 5 aa, Homo sapiens
FWETS

SEQ ID NO: 9398 - protein, 5 aa, Homo sapiens
LELEM

SEQ ID NO: 9399 - protein, 5 aa, Homo sapiens
TLCHS

SEQ ID NO: 9400 - protein, 5 aa, Homo sapiens
KQKGD

SEQ ID NO: 9401 - protein, 5 aa, Homo sapiens
RMMSR

SEQ ID NO: 9402 - protein, 5 aa, Homo sapiens
WISGN

SEQ ID NO: 9403 - protein, 5 aa, Homo sapiens
SHIQA

SEQ ID NO: 9404 - protein, 5 aa, Homo sapiens
TVLSF

SEQ ID NO: 9405 - protein, 5 aa, Homo sapiens
ARDCI

SEQ ID NO: 9406 - protein, 5 aa, Homo sapiens
GALND

SEQ ID NO: 9407 - protein, 5 aa, Homo sapiens
KDMAT

SEQ ID NO: 9408 - protein, 5 aa, Homo sapiens
HLLKM

SEQ ID NO: 9409 - protein, 5 aa, Homo sapiens
KARKL

SEQ ID NO: 9410 - protein, 5 aa, Homo sapiens
LDGLL

SEQ ID NO: 9411 - protein, 5 aa, Homo sapiens
TSGLK

SEQ ID NO: 9412 - protein, 5 aa, Homo sapiens
HIHLY

SEQ ID NO: 9413 - protein, 5 aa, Homo sapiens
HSNHH

SEQ ID NO: 9414 - protein, 5 aa, Homo sapiens
WPHLR

SEQ ID NO: 9415 - protein, 5 aa, Homo sapiens
YLRLL

SEQ ID NO: 9416 - protein, 5 aa, Homo sapiens
SSDQI

SEQ ID NO: 9417 - protein, 5 aa, Homo sapiens
NHTEL

SEQ ID NO: 9418 - protein, 5 aa, Homo sapiens
QDRGQ

SEQ ID NO: 9419 - protein, 5 aa, Homo sapiens
AGEHA

SEQ ID NO: 9420 - protein, 5 aa, Homo sapiens
RFFSK

SEQ ID NO: 9421 - protein, 5 aa, Homo sapiens
LVAAS

SEQ ID NO: 9422 - protein, 5 aa, Homo sapiens
PELVS

SEQ ID NO: 9423 - protein, 5 aa, Homo sapiens
TGLRM

SEQ ID NO: 9424 - protein, 5 aa, Homo sapiens
SSVKF

SEQ ID NO: 9425 - protein, 5 aa, Homo sapiens
ATVSP

SEQ ID NO: 9426 - protein, 5 aa, Homo sapiens
RHDTM

SEQ ID NO: 9427 - protein, 5 aa, Homo sapiens
SDAPD

SEQ ID NO: 9428 - protein, 5 aa, Homo sapiens
PFGRK

SEQ ID NO: 9429 - protein, 5 aa, Homo sapiens
KPNIR

SEQ ID NO: 9430 - protein, 5 aa, Homo sapiens
SPLAD

SEQ ID NO: 9431 - protein, 5 aa, Homo sapiens
NSNGL

SEQ ID NO: 9432 - protein, 5 aa, Homo sapiens
EKKVL

SEQ ID NO: 9433 - protein, 5 aa, Homo sapiens
FIPYH

SEQ ID NO: 9434 - protein, 5 aa, Homo sapiens
DKKTK

SEQ ID NO: 9435 - protein, 5 aa, Homo sapiens
SSKGK

SEQ ID NO: 9436 - protein, 5 aa, Homo sapiens
SPGPH

SEQ ID NO: 9437 - protein, 5 aa, Homo sapiens
SAKNV

SEQ ID NO: 9438 - protein, 5 aa, Homo sapiens
ISIKE

SEQ ID NO: 9439 - protein, 5 aa, Homo sapiens
CGPQR

SEQ ID NO: 9440 - protein, 5 aa, Homo sapiens
DDDWC

SEQ ID NO: 9441 - protein, 5 aa, Homo sapiens
QSIKN

SEQ ID NO: 9442 - protein, 5 aa, Homo sapiens
IHKNN

SEQ ID NO: 9443 - protein, 5 aa, Homo sapiens
ERQKP

SEQ ID NO: 9444 - protein, 5 aa, Homo sapiens
FCNKI

SEQ ID NO: 9445 - protein, 5 aa, Homo sapiens
EQEGK

SEQ ID NO: 9446 - protein, 5 aa, Homo sapiens
EDQTA

SEQ ID NO: 9447 - protein, 5 aa, Homo sapiens
VTVVG

SEQ ID NO: 9448 - protein, 5 aa, Homo sapiens
GKAHL

SEQ ID NO: 9449 - protein, 5 aa, Homo sapiens
LTHFS

SEQ ID NO: 9450 - protein, 5 aa, Homo sapiens
AQLQL

SEQ ID NO: 9451 - protein, 5 aa, Homo sapiens
RVGKL

SEQ ID NO: 9452 - protein, 5 aa, Homo sapiens
HMFKC

SEQ ID NO: 9453 - protein, 5 aa, Homo sapiens
GLDKV

SEQ ID NO: 9454 - protein, 5 aa, Homo sapiens
DLKKD

SEQ ID NO: 9455 - protein, 5 aa, Homo sapiens
LRSDP

SEQ ID NO: 9456 - protein, 5 aa, Homo sapiens
YEISV

SEQ ID NO: 9457 - protein, 5 aa, Homo sapiens
MPLSL

SEQ ID NO: 9458 - protein, 5 aa, Homo sapiens
RSSEL

SEQ ID NO: 9459 - protein, 5 aa, Homo sapiens
PLVNL

SEQ ID NO: 9460 - protein, 5 aa, Homo sapiens
SRGAG

SEQ ID NO: 9461 - protein, 5 aa, Homo sapiens
THSFH

SEQ ID NO: 9462 - protein, 5 aa, Homo sapiens
HEDKQ

SEQ ID NO: 9463 - protein, 5 aa, Homo sapiens
RHTEL

SEQ ID NO: 9464 - protein, 5 aa, Homo sapiens
KSVTV

SEQ ID NO: 9465 - protein, 5 aa, Homo sapiens
REGPQ

SEQ ID NO: 9466 - protein, 5 aa, Homo sapiens
ETLKA

SEQ ID NO: 9467 - protein, 5 aa, Homo sapiens
QNHQR

SEQ ID NO: 9468 - protein, 5 aa, Homo sapiens
LCWDY

SEQ ID NO: 9469 - protein, 5 aa, Homo sapiens
RASSQ

SEQ ID NO: 9470 - protein, 5 aa, Homo sapiens
GEERN

SEQ ID NO: 9471 - protein, 5 aa, Homo sapiens
NMDES

SEQ ID NO: 9472 - protein, 5 aa, Homo sapiens
RALEH

SEQ ID NO: 9473 - protein, 5 aa, Homo sapiens
ERYNG

SEQ ID NO: 9474 - protein, 5 aa, Homo sapiens
DLSKQ

SEQ ID NO: 9475 - protein, 5 aa, Homo sapiens
QFLAT

SEQ ID NO: 9476 - protein, 5 aa, Homo sapiens
RVDPY

SEQ ID NO: 9477 - protein, 5 aa, Homo sapiens
NDLQG

SEQ ID NO: 9478 - protein, 5 aa, Homo sapiens
EFRRF

SEQ ID NO: 9479 - protein, 5 aa, Homo sapiens
QCRPS

SEQ ID NO: 9480 - protein, 5 aa, Homo sapiens
ALSKL

SEQ ID NO: 9481 - protein, 5 aa, Homo sapiens
PNKPS

SEQ ID NO: 9482 - protein, 5 aa, Homo sapiens
LSEDD

SEQ ID NO: 9483 - protein, 5 aa, Homo sapiens
RAHLS

SEQ ID NO: 9484 - protein, 5 aa, Homo sapiens
PCSFL

SEQ ID NO: 9485 - protein, 5 aa, Homo sapiens
HYENF

SEQ ID NO: 9486 - protein, 5 aa, Homo sapiens
DHCPP

SEQ ID NO: 9487 - protein, 5 aa, Homo sapiens
FSEKN

SEQ ID NO: 9488 - protein, 5 aa, Homo sapiens
PGRCC

SEQ ID NO: 9489 - protein, 5 aa, Homo sapiens
ILGLY

SEQ ID NO: 9490 - protein, 5 aa, Homo sapiens
FARLL

SEQ ID NO: 9491 - protein, 5 aa, Homo sapiens
VTTCA

SEQ ID NO: 9492 - protein, 5 aa, Homo sapiens
DPLIG

SEQ ID NO: 9493 - protein, 5 aa, Homo sapiens
AATSN

SEQ ID NO: 9494 - protein, 5 aa, Homo sapiens
SGLQA

SEQ ID NO: 9495 - protein, 5 aa, Homo sapiens
FPRRD

SEQ ID NO: 9496 - protein, 5 aa, Homo sapiens
EIQMV

SEQ ID NO: 9497 - protein, 5 aa, Homo sapiens
ASTDL

SEQ ID NO: 9498 - protein, 5 aa, Homo sapiens
KQGKF

SEQ ID NO: 9499 - protein, 5 aa, Homo sapiens
TNLKH

SEQ ID NO: 9500 - protein, 5 aa, Homo sapiens
RSKQP

SEQ ID NO: 9501 - protein, 5 aa, Homo sapiens
PTQAS

SEQ ID NO: 9502 - protein, 5 aa, Homo sapiens
ERPQL

SEQ ID NO: 9503 - protein, 5 aa, Homo sapiens
ESRKV

SEQ ID NO: 9504 - protein, 5 aa, Homo sapiens
FIFQK

SEQ ID NO: 9505 - protein, 5 aa, Homo sapiens
GWFQA

SEQ ID NO: 9506 - protein, 5 aa, Homo sapiens
RSESS

SEQ ID NO: 9507 - protein, 5 aa, Homo sapiens
VYKYL

SEQ ID NO: 9508 - protein, 5 aa, Homo sapiens
DEFDF

SEQ ID NO: 9509 - protein, 5 aa, Homo sapiens
LSSFF

SEQ ID NO: 9510 - protein, 5 aa, Homo sapiens
PRHEV

SEQ ID NO: 9511 - protein, 5 aa, Homo sapiens
IAERK

SEQ ID NO: 9512 - protein, 5 aa, Homo sapiens
HSQEQ

SEQ ID NO: 9513 - protein, 5 aa, Homo sapiens
WLEEN

SEQ ID NO: 9514 - protein, 5 aa, Homo sapiens
PTDWK

SEQ ID NO: 9515 - protein, 5 aa, Homo sapiens
LLNSY

SEQ ID NO: 9516 - protein, 5 aa, Homo sapiens
KTKFE

SEQ ID NO: 9517 - protein, 5 aa, Homo sapiens
TDMED

SEQ ID NO: 9518 - protein, 5 aa, Homo sapiens
EGEAY

SEQ ID NO: 9519 - protein, 5 aa, Homo sapiens
EKYGI

SEQ ID NO: 9520 - protein, 5 aa, Homo sapiens
WRNRS

SEQ ID NO: 9521 - protein, 5 aa, Homo sapiens
GSWGH

SEQ ID NO: 9522 - protein, 5 aa, Homo sapiens
ALNTV

SEQ ID NO: 9523 - protein, 5 aa, Homo sapiens
VQCRK

SEQ ID NO: 9524 - protein, 5 aa, Homo sapiens
YKRIS

SEQ ID NO: 9525 - protein, 5 aa, Homo sapiens
QCMPS

SEQ ID NO: 9526 - protein, 5 aa, Homo sapiens
RLTPA

SEQ ID NO: 9527 - protein, 5 aa, Homo sapiens
DKHIF

SEQ ID NO: 9528 - protein, 5 aa, Homo sapiens
HHQPQ

SEQ ID NO: 9529 - protein, 5 aa, Homo sapiens
SAPQR

SEQ ID NO: 9530 - protein, 5 aa, Homo sapiens
DKYMK

SEQ ID NO: 9531 - protein, 5 aa, Homo sapiens
THIYI

SEQ ID NO: 9532 - protein, 5 aa, Homo sapiens
SLGLG

SEQ ID NO: 9533 - protein, 5 aa, Homo sapiens
ACCLL

SEQ ID NO: 9534 - protein, 5 aa, Homo sapiens
MKAIA

SEQ ID NO: 9535 - protein, 5 aa, Homo sapiens
KMINY

SEQ ID NO: 9536 - protein, 5 aa, Homo sapiens
KSESS

SEQ ID NO: 9537 - protein, 5 aa, Homo sapiens
LECKL

SEQ ID NO: 9538 - protein, 5 aa, Homo sapiens
HTDSS

SEQ ID NO: 9539 - protein, 5 aa, Homo sapiens
QLSAF

SEQ ID NO: 9540 - protein, 5 aa, Homo sapiens
LGVAM

SEQ ID NO: 9541 - protein, 5 aa, Homo sapiens
TAIVL

SEQ ID NO: 9542 - protein, 5 aa, Homo sapiens
GRSRY

SEQ ID NO: 9543 - protein, 5 aa, Homo sapiens
RGSAL

SEQ ID NO: 9544 - protein, 5 aa, Homo sapiens
LFQLV

SEQ ID NO: 9545 - protein, 5 aa, Homo sapiens
TMNTL

SEQ ID NO: 9546 - protein, 5 aa, Homo sapiens
KDSRG

SEQ ID NO: 9547 - protein, 5 aa, Homo sapiens
LPSEK

SEQ ID NO: 9548 - protein, 5 aa, Homo sapiens
IFKGR

SEQ ID NO: 9549 - protein, 5 aa, Homo sapiens
GIRLT

SEQ ID NO: 9550 - protein, 5 aa, Homo sapiens
NESKA

SEQ ID NO: 9551 - protein, 5 aa, Homo sapiens
DNDYN

SEQ ID NO: 9552 - protein, 5 aa, Homo sapiens
GMLRS

SEQ ID NO: 9553 - protein, 5 aa, Homo sapiens
LGLDR

SEQ ID NO: 9554 - protein, 5 aa, Homo sapiens
HHAFR

SEQ ID NO: 9555 - protein, 5 aa, Homo sapiens
RSSPE

SEQ ID NO: 9556 - protein, 5 aa, Homo sapiens
RECEV

SEQ ID NO: 9557 - protein, 5 aa, Homo sapiens
TSLKL

SEQ ID NO: 9558 - protein, 5 aa, Homo sapiens
MAPPS

SEQ ID NO: 9559 - protein, 5 aa, Homo sapiens
VESPL

SEQ ID NO: 9560 - protein, 5 aa, Homo sapiens
ITIYS

SEQ ID NO: 9561 - protein, 5 aa, Homo sapiens
LPRGC

SEQ ID NO: 9562 - protein, 5 aa, Homo sapiens
EKYRV

SEQ ID NO: 9563 - protein, 5 aa, Homo sapiens
PVICI

SEQ ID NO: 9564 - protein, 5 aa, Homo sapiens
GTEEV

SEQ ID NO: 9565 - protein, 5 aa, Homo sapiens
SMASR

SEQ ID NO: 9566 - protein, 5 aa, Homo sapiens
FHAPL

SEQ ID NO: 9567 - protein, 5 aa, Homo sapiens
PAQAV

SEQ ID NO: 9568 - protein, 5 aa, Homo sapiens
TGGVY

SEQ ID NO: 9569 - protein, 5 aa, Homo sapiens
GSDSD

SEQ ID NO: 9570 - protein, 5 aa, Homo sapiens
LGFFF

SEQ ID NO: 9571 - protein, 5 aa, Homo sapiens
DSDKQ

SEQ ID NO: 9572 - protein, 5 aa, Homo sapiens
CLVIE

SEQ ID NO: 9573 - protein, 5 aa, Homo sapiens
LPMVV

SEQ ID NO: 9574 - protein, 5 aa, Homo sapiens
NMDLD

SEQ ID NO: 9575 - protein, 5 aa, Homo sapiens
LIKED

SEQ ID NO: 9576 - protein, 5 aa, Homo sapiens
EEIDG

SEQ ID NO: 9577 - protein, 5 aa, Homo sapiens
AILQK

SEQ ID NO: 9578 - protein, 5 aa, Homo sapiens
KIDDA

SEQ ID NO: 9579 - protein, 5 aa, Homo sapiens
TSGDY

SEQ ID NO: 9580 - protein, 5 aa, Homo sapiens
INKKE

SEQ ID NO: 9581 - protein, 5 aa, Homo sapiens
PELDS

SEQ ID NO: 9582 - protein, 5 aa, Homo sapiens
CCSEN

SEQ ID NO: 9583 - protein, 5 aa, Homo sapiens
CTEKP

SEQ ID NO: 9584 - protein, 5 aa, Homo sapiens
KVLVF

SEQ ID NO: 9585 - protein, 5 aa, Homo sapiens
KSSNT

SEQ ID NO: 9586 - protein, 5 aa, Homo sapiens
PSGKR

SEQ ID NO: 9587 - protein, 5 aa, Homo sapiens
CPPSS

SEQ ID NO: 9588 - protein, 5 aa, Homo sapiens
MFRIV

SEQ ID NO: 9589 - protein, 5 aa, Homo sapiens
KEFKF

SEQ ID NO: 9590 - protein, 5 aa, Homo sapiens
LHPTE

SEQ ID NO: 9591 - protein, 5 aa, Homo sapiens
GLPDF

SEQ ID NO: 9592 - protein, 5 aa, Homo sapiens
GREET

SEQ ID NO: 9593 - protein, 5 aa, Homo sapiens
EKASF

SEQ ID NO: 9594 - protein, 5 aa, Homo sapiens
YKKIS

SEQ ID NO: 9595 - protein, 5 aa, Homo sapiens
REFSR

SEQ ID NO: 9596 - protein, 5 aa, Homo sapiens
ALRKK

SEQ ID NO: 9597 - protein, 5 aa, Homo sapiens
ISMKT

SEQ ID NO: 9598 - protein, 5 aa, Homo sapiens
EKPCE

SEQ ID NO: 9599 - protein, 5 aa, Homo sapiens
LGFLR

SEQ ID NO: 9600 - protein, 5 aa, Homo sapiens
RNQNK

SEQ ID NO: 9601 - protein, 5 aa, Homo sapiens
NEDME

SEQ ID NO: 9602 - protein, 5 aa, Homo sapiens
RASFH

SEQ ID NO: 9603 - protein, 5 aa, Homo sapiens
LEGHF

SEQ ID NO: 9604 - protein, 5 aa, Homo sapiens
VECSV

SEQ ID NO: 9605 - protein, 5 aa, Homo sapiens
TATKA

SEQ ID NO: 9606 - protein, 5 aa, Homo sapiens
SWWPL

SEQ ID NO: 9607 - protein, 5 aa, Homo sapiens
KVWTC

SEQ ID NO: 9608 - protein, 5 aa, Homo sapiens
PRKDM

SEQ ID NO: 9609 - protein, 5 aa, Homo sapiens
VTEMP

SEQ ID NO: 9610 - protein, 5 aa, Homo sapiens
KKDSK

SEQ ID NO: 9611 - protein, 5 aa, Homo sapiens
SHKSR

SEQ ID NO: 9612 - protein, 5 aa, Homo sapiens
RFQST

SEQ ID NO: 9613 - protein, 5 aa, Homo sapiens
ATLFF

SEQ ID NO: 9614 - protein, 5 aa, Homo sapiens
STGKW

SEQ ID NO: 9615 - protein, 5 aa, Homo sapiens
VRIDV

SEQ ID NO: 9616 - protein, 5 aa, Homo sapiens
IRQNS

SEQ ID NO: 9617 - protein, 5 aa, Homo sapiens
NKNSR

SEQ ID NO: 9618 - protein, 5 aa, Homo sapiens
PYSAV

SEQ ID NO: 9619 - protein, 5 aa, Homo sapiens
SEEEM

SEQ ID NO: 9620 - protein, 5 aa, Homo sapiens
VLHFS

SEQ ID NO: 9621 - protein, 5 aa, Homo sapiens
SYSQS

SEQ ID NO: 9622 - protein, 5 aa, Homo sapiens
HQGLI

SEQ ID NO: 9623 - protein, 5 aa, Homo sapiens
LRTVL

SEQ ID NO: 9624 - protein, 5 aa, Homo sapiens
KTSLY

SEQ ID NO: 9625 - protein, 5 aa, Homo sapiens
THAGA

SEQ ID NO: 9626 - protein, 5 aa, Homo sapiens
GFLFL

SEQ ID NO: 9627 - protein, 5 aa, Homo sapiens
TVSQN

SEQ ID NO: 9628 - protein, 5 aa, Homo sapiens
LAFVC

SEQ ID NO: 9629 - protein, 5 aa, Homo sapiens
RENKL

SEQ ID NO: 9630 - protein, 5 aa, Homo sapiens
LVHIR

SEQ ID NO: 9631 - protein, 5 aa, Homo sapiens
IGFYI

SEQ ID NO: 9632 - protein, 5 aa, Homo sapiens
ACVIL

SEQ ID NO: 9633 - protein, 5 aa, Homo sapiens
DEMDR

SEQ ID NO: 9634 - protein, 5 aa, Homo sapiens
EISPL

SEQ ID NO: 9635 - protein, 5 aa, Homo sapiens
TYFYF

SEQ ID NO: 9636 - protein, 5 aa, Homo sapiens
KDSRH

SEQ ID NO: 9637 - protein, 5 aa, Homo sapiens
LGEDS

SEQ ID NO: 9638 - protein, 5 aa, Homo sapiens
QRSTM

SEQ ID NO: 9639 - protein, 5 aa, Homo sapiens
FRAIV

SEQ ID NO: 9640 - protein, 5 aa, Homo sapiens
QMRSR

SEQ ID NO: 9641 - protein, 5 aa, Homo sapiens
ESLYS

SEQ ID NO: 9642 - protein, 5 aa, Homo sapiens
YTIGL

SEQ ID NO: 9643 - protein, 5 aa, Homo sapiens
CEKDD

SEQ ID NO: 9644 - protein, 5 aa, Homo sapiens
LQVYC

SEQ ID NO: 9645 - protein, 5 aa, Homo sapiens
GEFIY

SEQ ID NO: 9646 - protein, 5 aa, Homo sapiens
SREDT

SEQ ID NO: 9647 - protein, 5 aa, Homo sapiens
IMLTP

SEQ ID NO: 9648 - protein, 5 aa, Homo sapiens
SSCLG

SEQ ID NO: 9649 - protein, 5 aa, Homo sapiens
SAQNF

SEQ ID NO: 9650 - protein, 5 aa, Homo sapiens
QPEDV

SEQ ID NO: 9651 - protein, 5 aa, Homo sapiens
KPRTP

SEQ ID NO: 9652 - protein, 5 aa, Homo sapiens
YEVIY

SEQ ID NO: 9653 - protein, 5 aa, Homo sapiens
HQTTR

SEQ ID NO: 9654 - protein, 5 aa, Homo sapiens
KIKPI

SEQ ID NO: 9655 - protein, 5 aa, Homo sapiens
ESSLS

SEQ ID NO: 9656 - protein, 5 aa, Homo sapiens
LKDLI

SEQ ID NO: 9657 - protein, 5 aa, Homo sapiens
REACG

SEQ ID NO: 9658 - protein, 5 aa, Homo sapiens
DATTD

SEQ ID NO: 9659 - protein, 5 aa, Homo sapiens
RISEK

SEQ ID NO: 9660 - protein, 5 aa, Homo sapiens
VTVKE

SEQ ID NO: 9661 - protein, 5 aa, Homo sapiens
ERALG

SEQ ID NO: 9662 - protein, 5 aa, Homo sapiens
HRPAA

SEQ ID NO: 9663 - protein, 5 aa, Homo sapiens
SNSSS

SEQ ID NO: 9664 - protein, 5 aa, Homo sapiens
DIEDF

SEQ ID NO: 9665 - protein, 5 aa, Homo sapiens
RWGLF

SEQ ID NO: 9666 - protein, 5 aa, Homo sapiens
KRLCI

SEQ ID NO: 9667 - protein, 5 aa, Homo sapiens
LRALK

SEQ ID NO: 9668 - protein, 5 aa, Homo sapiens
RPWRF

SEQ ID NO: 9669 - protein, 5 aa, Homo sapiens
QVLRN

SEQ ID NO: 9670 - protein, 5 aa, Homo sapiens
PKNCK

SEQ ID NO: 9671 - protein, 5 aa, Homo sapiens
SRHRR

SEQ ID NO: 9672 - protein, 5 aa, Homo sapiens
TSTDF

SEQ ID NO: 9673 - protein, 5 aa, Homo sapiens
RAEKS

SEQ ID NO: 9674 - protein, 5 aa, Homo sapiens
RFYHK

SEQ ID NO: 9675 - protein, 5 aa, Homo sapiens
VTSDP

SEQ ID NO: 9676 - protein, 5 aa, Homo sapiens
AKPKP

SEQ ID NO: 9677 - protein, 5 aa, Homo sapiens
KRRRT

SEQ ID NO: 9678 - protein, 5 aa, Homo sapiens
IIPKI

SEQ ID NO: 9679 - protein, 5 aa, Homo sapiens
SNKEN

SEQ ID NO: 9680 - protein, 5 aa, Homo sapiens
VIFPQ

SEQ ID NO: 9681 - protein, 5 aa, Homo sapiens
TCDRC

SEQ ID NO: 9682 - protein, 5 aa, Homo sapiens
RAAGP

SEQ ID NO: 9683 - protein, 5 aa, Homo sapiens
TYRTF

SEQ ID NO: 9684 - protein, 5 aa, Homo sapiens
TDVTL

SEQ ID NO: 9685 - protein, 5 aa, Homo sapiens
ERLLM

SEQ ID NO: 9686 - protein, 5 aa, Homo sapiens
PEEQT

SEQ ID NO: 9687 - protein, 5 aa, Homo sapiens
LELLA

SEQ ID NO: 9688 - protein, 5 aa, Homo sapiens
KKPKV

SEQ ID NO: 9689 - protein, 5 aa, Homo sapiens
NINIT

SEQ ID NO: 9690 - protein, 5 aa, Homo sapiens
RTSFH

SEQ ID NO: 9691 - protein, 5 aa, Homo sapiens
KSIEE

SEQ ID NO: 9692 - protein, 5 aa, Homo sapiens
VERAL

SEQ ID NO: 9693 - protein, 5 aa, Homo sapiens
LFLGV

SEQ ID NO: 9694 - protein, 5 aa, Homo sapiens
GVVAR

SEQ ID NO: 9695 - protein, 5 aa, Homo sapiens
KPCCY

SEQ ID NO: 9696 - protein, 5 aa, Homo sapiens
TASQR

SEQ ID NO: 9697 - protein, 5 aa, Homo sapiens
HLSTL

SEQ ID NO: 9698 - protein, 5 aa, Homo sapiens
KVSAL

SEQ ID NO: 9699 - protein, 5 aa, Homo sapiens
EESDS

SEQ ID NO: 9700 - protein, 5 aa, Homo sapiens
NKHIA

SEQ ID NO: 9701 - protein, 5 aa, Homo sapiens
FCMEL

SEQ ID NO: 9702 - protein, 5 aa, Homo sapiens
VSSSA

SEQ ID NO: 9703 - protein, 5 aa, Homo sapiens
TRCTL

SEQ ID NO: 9704 - protein, 5 aa, Homo sapiens
RGERA

SEQ ID NO: 9705 - protein, 5 aa, Homo sapiens
TSTTL

SEQ ID NO: 9706 - protein, 5 aa, Homo sapiens
PIPQR

SEQ ID NO: 9707 - protein, 5 aa, Homo sapiens
NQDNP

SEQ ID NO: 9708 - protein, 5 aa, Homo sapiens
LCEEK

SEQ ID NO: 9709 - protein, 5 aa, Homo sapiens
KAKFN

SEQ ID NO: 9710 - protein, 5 aa, Homo sapiens
KQMAP

SEQ ID NO: 9711 - protein, 5 aa, Homo sapiens
LHKKN

SEQ ID NO: 9712 - protein, 5 aa, Homo sapiens
GEDDS

SEQ ID NO: 9713 - protein, 5 aa, Homo sapiens
AIEKM

SEQ ID NO: 9714 - protein, 5 aa, Homo sapiens
ITTNL

SEQ ID NO: 9715 - protein, 5 aa, Homo sapiens
EKQRG

SEQ ID NO: 9716 - protein, 5 aa, Homo sapiens
DARGY

SEQ ID NO: 9717 - protein, 5 aa, Homo sapiens
LSPGV

SEQ ID NO: 9718 - protein, 5 aa, Homo sapiens
SLEQG

SEQ ID NO: 9719 - protein, 5 aa, Homo sapiens
WLSEH

SEQ ID NO: 9720 - protein, 5 aa, Homo sapiens
LPPAQ

SEQ ID NO: 9721 - protein, 5 aa, Homo sapiens
LGQRK

SEQ ID NO: 9722 - protein, 5 aa, Homo sapiens
KSALL

SEQ ID NO: 9723 - protein, 5 aa, Homo sapiens
YLRGK

SEQ ID NO: 9724 - protein, 5 aa, Homo sapiens
APHFR

SEQ ID NO: 9725 - protein, 5 aa, Homo sapiens
IKARK

SEQ ID NO: 9726 - protein, 5 aa, Homo sapiens
KYPPV

SEQ ID NO: 9727 - protein, 5 aa, Homo sapiens
QRAEA

SEQ ID NO: 9728 - protein, 5 aa, Homo sapiens
KVLTW

SEQ ID NO: 9729 - protein, 5 aa, Homo sapiens
RISQM

SEQ ID NO: 9730 - protein, 5 aa, Homo sapiens
PASEK

SEQ ID NO: 9731 - protein, 5 aa, Homo sapiens
LVRVE

SEQ ID NO: 9732 - protein, 5 aa, Homo sapiens
AVGDN

SEQ ID NO: 9733 - protein, 5 aa, Homo sapiens
PAPEN

SEQ ID NO: 9734 - protein, 5 aa, Homo sapiens
LATQR

SEQ ID NO: 9735 - protein, 5 aa, Homo sapiens
LGRKT

SEQ ID NO: 9736 - protein, 5 aa, Homo sapiens
YSPLP

SEQ ID NO: 9737 - protein, 5 aa, Homo sapiens
LSAAT

SEQ ID NO: 9738 - protein, 5 aa, Homo sapiens
SLSDT

SEQ ID NO: 9739 - protein, 5 aa, Homo sapiens
SIKVH

SEQ ID NO: 9740 - protein, 5 aa, Homo sapiens
HFDAM

SEQ ID NO: 9741 - protein, 5 aa, Homo sapiens
PSIIS

SEQ ID NO: 9742 - protein, 5 aa, Homo sapiens
SCADQ

SEQ ID NO: 9743 - protein, 5 aa, Homo sapiens
QDKIN

SEQ ID NO: 9744 - protein, 5 aa, Homo sapiens
MEVSC

SEQ ID NO: 9745 - protein, 5 aa, Homo sapiens
FLHFS

SEQ ID NO: 9746 - protein, 5 aa, Homo sapiens
IGATR

SEQ ID NO: 9747 - protein, 5 aa, Homo sapiens
PPPPL

SEQ ID NO: 9748 - protein, 5 aa, Homo sapiens
QMEPV

SEQ ID NO: 9749 - protein, 5 aa, Homo sapiens
ELYAV

SEQ ID NO: 9750 - protein, 5 aa, Homo sapiens
LMVLS

SEQ ID NO: 9751 - protein, 5 aa, Homo sapiens
ISVGR

SEQ ID NO: 9752 - protein, 5 aa, Homo sapiens
VYIRQ

SEQ ID NO: 9753 - protein, 5 aa, Homo sapiens
LPPID

SEQ ID NO: 9754 - protein, 5 aa, Homo sapiens
HVRLH

SEQ ID NO: 9755 - protein, 5 aa, Homo sapiens
KQDEL

SEQ ID NO: 9756 - protein, 5 aa, Homo sapiens
PSERE

SEQ ID NO: 9757 - protein, 5 aa, Homo sapiens
SNNVR

SEQ ID NO: 9758 - protein, 5 aa, Homo sapiens
LKEVL

SEQ ID NO: 9759 - protein, 5 aa, Homo sapiens
GQEIA

SEQ ID NO: 9760 - protein, 5 aa, Homo sapiens
RPKSE

SEQ ID NO: 9761 - protein, 5 aa, Homo sapiens
GVRAW

SEQ ID NO: 9762 - protein, 5 aa, Homo sapiens
VPLPQ

SEQ ID NO: 9763 - protein, 5 aa, Homo sapiens
VEADQ

SEQ ID NO: 9764 - protein, 5 aa, Homo sapiens
RVTLN

SEQ ID NO: 9765 - protein, 5 aa, Homo sapiens
AESHL

SEQ ID NO: 9766 - protein, 5 aa, Homo sapiens
VELSA

SEQ ID NO: 9767 - protein, 5 aa, Homo sapiens
GPFGS

SEQ ID NO: 9768 - protein, 5 aa, Homo sapiens
EMEIP

SEQ ID NO: 9769 - protein, 5 aa, Homo sapiens
FEPHI

SEQ ID NO: 9770 - protein, 5 aa, Homo sapiens
VVPVP

SEQ ID NO: 9771 - protein, 5 aa, Homo sapiens
VKLLE

SEQ ID NO: 9772 - protein, 5 aa, Homo sapiens
LTSMC

SEQ ID NO: 9773 - protein, 5 aa, Homo sapiens
GLLPP

SEQ ID NO: 9774 - protein, 5 aa, Homo sapiens
GGLAS

SEQ ID NO: 9775 - protein, 5 aa, Homo sapiens
SYSVS

SEQ ID NO: 9776 - protein, 5 aa, Homo sapiens
IPKDV

SEQ ID NO: 9777 - protein, 5 aa, Homo sapiens
NRNFI

SEQ ID NO: 9778 - protein, 5 aa, Homo sapiens
GVTCG

SEQ ID NO: 9779 - protein, 5 aa, Homo sapiens
CCVQE

SEQ ID NO: 9780 - protein, 5 aa, Homo sapiens
TVFHS

SEQ ID NO: 9781 - protein, 5 aa, Homo sapiens
PWVIT

SEQ ID NO: 9782 - protein, 5 aa, Homo sapiens
DYYLR

SEQ ID NO: 9783 - protein, 5 aa, Homo sapiens
VRLML

SEQ ID NO: 9784 - protein, 5 aa, Homo sapiens
QSQLN

SEQ ID NO: 9785 - protein, 5 aa, Homo sapiens
EMESV

SEQ ID NO: 9786 - protein, 5 aa, Homo sapiens
VPSLL

SEQ ID NO: 9787 - protein, 5 aa, Homo sapiens
ALMGV

SEQ ID NO: 9788 - protein, 5 aa, Homo sapiens
DLALK

SEQ ID NO: 9789 - protein, 5 aa, Homo sapiens
LESAS

SEQ ID NO: 9790 - protein, 5 aa, Homo sapiens
SVCSL

SEQ ID NO: 9791 - protein, 5 aa, Homo sapiens
LPDIY

SEQ ID NO: 9792 - protein, 5 aa, Homo sapiens
KRKCC

SEQ ID NO: 9793 - protein, 5 aa, Homo sapiens
KIRSF

SEQ ID NO: 9794 - protein, 5 aa, Homo sapiens
TQEAA

SEQ ID NO: 9795 - protein, 5 aa, Homo sapiens
CCWPS

SEQ ID NO: 9796 - protein, 5 aa, Homo sapiens
SPPTV

SEQ ID NO: 9797 - protein, 5 aa, Homo sapiens
SIQMK

SEQ ID NO: 9798 - protein, 5 aa, Homo sapiens
KRQKQ

SEQ ID NO: 9799 - protein, 5 aa, Homo sapiens
QETAV

SEQ ID NO: 9800 - protein, 5 aa, Homo sapiens
KNRGS

SEQ ID NO: 9801 - protein, 5 aa, Homo sapiens
VHCME

SEQ ID NO: 9802 - protein, 5 aa, Homo sapiens
VESGS

SEQ ID NO: 9803 - protein, 5 aa, Homo sapiens
KSKNS

SEQ ID NO: 9804 - protein, 5 aa, Homo sapiens
MSIMT

SEQ ID NO: 9805 - protein, 5 aa, Homo sapiens
NITLG

SEQ ID NO: 9806 - protein, 5 aa, Homo sapiens
GQPQP

SEQ ID NO: 9807 - protein, 5 aa, Homo sapiens
PLAIH

SEQ ID NO: 9808 - protein, 5 aa, Homo sapiens
SKLHS

SEQ ID NO: 9809 - protein, 5 aa, Homo sapiens
KKKRD

SEQ ID NO: 9810 - protein, 5 aa, Homo sapiens
TVWDG

SEQ ID NO: 9811 - protein, 5 aa, Homo sapiens
SCSIP

SEQ ID NO: 9812 - protein, 5 aa, Homo sapiens
EPPHR

SEQ ID NO: 9813 - protein, 5 aa, Homo sapiens
KKKGK

SEQ ID NO: 9814 - protein, 5 aa, Homo sapiens
LSHCA

SEQ ID NO: 9815 - protein, 5 aa, Homo sapiens
MDSKT

SEQ ID NO: 9816 - protein, 5 aa, Homo sapiens
TGASL

SEQ ID NO: 9817 - protein, 5 aa, Homo sapiens
FTETG

SEQ ID NO: 9818 - protein, 5 aa, Homo sapiens
PSVQG

SEQ ID NO: 9819 - protein, 5 aa, Homo sapiens
LIGQS

SEQ ID NO: 9820 - protein, 5 aa, Homo sapiens
DDAKK

SEQ ID NO: 9821 - protein, 5 aa, Homo sapiens
WCTVY

SEQ ID NO: 9822 - protein, 5 aa, Homo sapiens
PLHSA

SEQ ID NO: 9823 - protein, 5 aa, Homo sapiens
WLLIA

SEQ ID NO: 9824 - protein, 5 aa, Homo sapiens
CKKDH

SEQ ID NO: 9825 - protein, 5 aa, Homo sapiens
NSNST

SEQ ID NO: 9826 - protein, 5 aa, Homo sapiens
KRRHE

SEQ ID NO: 9827 - protein, 5 aa, Homo sapiens
ACCAR

SEQ ID NO: 9828 - protein, 5 aa, Homo sapiens
SMLNP

SEQ ID NO: 9829 - protein, 5 aa, Homo sapiens
RGAGP

SEQ ID NO: 9830 - protein, 5 aa, Homo sapiens
FSHRQ

SEQ ID NO: 9831 - protein, 5 aa, Homo sapiens
GSRHK

SEQ ID NO: 9832 - protein, 5 aa, Homo sapiens
ADQGC

SEQ ID NO: 9833 - protein, 5 aa, Homo sapiens
PKRME

SEQ ID NO: 9834 - protein, 5 aa, Homo sapiens
KIHMG

SEQ ID NO: 9835 - protein, 5 aa, Homo sapiens
MESVL

SEQ ID NO: 9836 - protein, 5 aa, Homo sapiens
HFHPS

SEQ ID NO: 9837 - protein, 5 aa, Homo sapiens
GALWS

SEQ ID NO: 9838 - protein, 5 aa, Homo sapiens
RHLSP

SEQ ID NO: 9839 - protein, 5 aa, Homo sapiens
TFVDD

SEQ ID NO: 9840 - protein, 5 aa, Homo sapiens
GVCGQ

SEQ ID NO: 9841 - protein, 5 aa, Homo sapiens
KWLQL

SEQ ID NO: 9842 - protein, 5 aa, Homo sapiens
PSPSS

SEQ ID NO: 9843 - protein, 5 aa, Homo sapiens
SWFGC

SEQ ID NO: 9844 - protein, 5 aa, Homo sapiens
FAGKI

SEQ ID NO: 9845 - protein, 5 aa, Homo sapiens
YENTQ

SEQ ID NO: 9846 - protein, 5 aa, Homo sapiens
CCSSK

SEQ ID NO: 9847 - protein, 5 aa, Homo sapiens
YLLNG

SEQ ID NO: 9848 - protein, 5 aa, Homo sapiens
YHDTN

SEQ ID NO: 9849 - protein, 5 aa, Homo sapiens
ALPKH

SEQ ID NO: 9850 - protein, 5 aa, Homo sapiens
QGSID

SEQ ID NO: 9851 - protein, 5 aa, Homo sapiens
TKKKL

SEQ ID NO: 9852 - protein, 5 aa, Homo sapiens
LPVQL

SEQ ID NO: 9853 - protein, 5 aa, Homo sapiens
PIHLS

SEQ ID NO: 9854 - protein, 5 aa, Homo sapiens
PQAPS

SEQ ID NO: 9855 - protein, 5 aa, Homo sapiens
CSSAV

SEQ ID NO: 9856 - protein, 5 aa, Homo sapiens
VNTCG

SEQ ID NO: 9857 - protein, 5 aa, Homo sapiens
SYCNL

SEQ ID NO: 9858 - protein, 5 aa, Homo sapiens
NRTKP

SEQ ID NO: 9859 - protein, 5 aa, Homo sapiens
SGAAV

SEQ ID NO: 9860 - protein, 5 aa, Homo sapiens
RGEDS

SEQ ID NO: 9861 - protein, 5 aa, Homo sapiens
EEEQC

SEQ ID NO: 9862 - protein, 5 aa, Homo sapiens
EPRPQ

SEQ ID NO: 9863 - protein, 5 aa, Homo sapiens
GEASL

SEQ ID NO: 9864 - protein, 5 aa, Homo sapiens
IGCGR

SEQ ID NO: 9865 - protein, 5 aa, Homo sapiens
GTPLP

SEQ ID NO: 9866 - protein, 5 aa, Homo sapiens
AKDEL

SEQ ID NO: 9867 - protein, 5 aa, Homo sapiens
IKLCP

SEQ ID NO: 9868 - protein, 5 aa, Homo sapiens
TKQSI

SEQ ID NO: 9869 - protein, 5 aa, Homo sapiens
GDTTV

SEQ ID NO: 9870 - protein, 5 aa, Homo sapiens
LGKPL

SEQ ID NO: 9871 - protein, 5 aa, Homo sapiens
LLLLE

SEQ ID NO: 9872 - protein, 5 aa, Homo sapiens
QRCTK

SEQ ID NO: 9873 - protein, 5 aa, Homo sapiens
FRYNK

SEQ ID NO: 9874 - protein, 5 aa, Homo sapiens
PKNSS

SEQ ID NO: 9875 - protein, 5 aa, Homo sapiens
RGLFS

SEQ ID NO: 9876 - protein, 5 aa, Homo sapiens
PPILR

SEQ ID NO: 9877 - protein, 5 aa, Homo sapiens
PDEND

SEQ ID NO: 9878 - protein, 5 aa, Homo sapiens
EGPSA

SEQ ID NO: 9879 - protein, 5 aa, Homo sapiens
TQSTT

SEQ ID NO: 9880 - protein, 5 aa, Homo sapiens
QLLTE

SEQ ID NO: 9881 - protein, 5 aa, Homo sapiens
GTGAS

SEQ ID NO: 9882 - protein, 5 aa, Homo sapiens
CRRKK

SEQ ID NO: 9883 - protein, 5 aa, Homo sapiens
HTAGC

SEQ ID NO: 9884 - protein, 5 aa, Homo sapiens
ASLLS

SEQ ID NO: 9885 - protein, 5 aa, Homo sapiens
LRGSH

SEQ ID NO: 9886 - protein, 5 aa, Homo sapiens
MEVLI

SEQ ID NO: 9887 - protein, 5 aa, Homo sapiens
KFVSA

SEQ ID NO: 9888 - protein, 5 aa, Homo sapiens
VSFWW

SEQ ID NO: 9889 - protein, 5 aa, Homo sapiens
PGEVP

SEQ ID NO: 9890 - protein, 5 aa, Homo sapiens
PSQRS

SEQ ID NO: 9891 - protein, 5 aa, Homo sapiens
RKRLR

SEQ ID NO: 9892 - protein, 5 aa, Homo sapiens
FDSDD

SEQ ID NO: 9893 - protein, 5 aa, Homo sapiens
YYCFG

SEQ ID NO: 9894 - protein, 5 aa, Homo sapiens
FLNLP

SEQ ID NO: 9895 - protein, 5 aa, Homo sapiens
VPKTD

SEQ ID NO: 9896 - protein, 5 aa, Homo sapiens
FSWFT

SEQ ID NO: 9897 - protein, 5 aa, Homo sapiens
TGKKL

SEQ ID NO: 9898 - protein, 5 aa, Homo sapiens
EATTD

SEQ ID NO: 9899 - protein, 5 aa, Homo sapiens
PVITE

SEQ ID NO: 9900 - protein, 5 aa, Homo sapiens
KEVRG

SEQ ID NO: 9901 - protein, 5 aa, Homo sapiens
GGSRL

SEQ ID NO: 9902 - protein, 5 aa, Homo sapiens
YERRR

SEQ ID NO: 9903 - protein, 5 aa, Homo sapiens
GGYIW

SEQ ID NO: 9904 - protein, 5 aa, Homo sapiens
HLIGY

SEQ ID NO: 9905 - protein, 5 aa, Homo sapiens
HFLLS

SEQ ID NO: 9906 - protein, 5 aa, Homo sapiens
QPLTP

SEQ ID NO: 9907 - protein, 5 aa, Homo sapiens
IASLI

SEQ ID NO: 9908 - protein, 5 aa, Homo sapiens
ALSLF

SEQ ID NO: 9909 - protein, 5 aa, Homo sapiens
PGAID

SEQ ID NO: 9910 - protein, 5 aa, Homo sapiens
DSSTC

SEQ ID NO: 9911 - protein, 5 aa, Homo sapiens
QDVSK

SEQ ID NO: 9912 - protein, 5 aa, Homo sapiens
IAAPT

SEQ ID NO: 9913 - protein, 5 aa, Homo sapiens
AECCQ

SEQ ID NO: 9914 - protein, 5 aa, Homo sapiens
KQPTS

SEQ ID NO: 9915 - protein, 5 aa, Homo sapiens
QKIHQ

SEQ ID NO: 9916 - protein, 5 aa, Homo sapiens
DLREL

SEQ ID NO: 9917 - protein, 5 aa, Homo sapiens
SLDQQ

SEQ ID NO: 9918 - protein, 5 aa, Homo sapiens
KKIYC

SEQ ID NO: 9919 - protein, 5 aa, Homo sapiens
LQRGR

SEQ ID NO: 9920 - protein, 5 aa, Homo sapiens
DKRAS

SEQ ID NO: 9921 - protein, 5 aa, Homo sapiens
AENGK

SEQ ID NO: 9922 - protein, 5 aa, Homo sapiens
YRRPE

SEQ ID NO: 9923 - protein, 5 aa, Homo sapiens
AASDE

SEQ ID NO: 9924 - protein, 5 aa, Homo sapiens
ASLGK

SEQ ID NO: 9925 - protein, 5 aa, Homo sapiens
AMKKL

SEQ ID NO: 9926 - protein, 5 aa, Homo sapiens
SESTD

SEQ ID NO: 9927 - protein, 5 aa, Homo sapiens
CPASC

SEQ ID NO: 9928 - protein, 5 aa, Homo sapiens
RATPT

SEQ ID NO: 9929 - protein, 5 aa, Homo sapiens
KKLLT

SEQ ID NO: 9930 - protein, 5 aa, Homo sapiens
DPLPT

SEQ ID NO: 9931 - protein, 5 aa, Homo sapiens
MMRNN

SEQ ID NO: 9932 - protein, 5 aa, Homo sapiens
NNLCD

SEQ ID NO: 9933 - protein, 5 aa, Homo sapiens
QPEST

SEQ ID NO: 9934 - protein, 5 aa, Homo sapiens
TCSCC

SEQ ID NO: 9935 - protein, 5 aa, Homo sapiens
SLLEK

SEQ ID NO: 9936 - protein, 5 aa, Homo sapiens
HYSFF

SEQ ID NO: 9937 - protein, 5 aa, Homo sapiens
NLSVD

SEQ ID NO: 9938 - protein, 5 aa, Homo sapiens
QMSQM

SEQ ID NO: 9939 - protein, 5 aa, Homo sapiens
NFDDE

SEQ ID NO: 9940 - protein, 5 aa, Homo sapiens
PFHFV

SEQ ID NO: 9941 - protein, 5 aa, Homo sapiens
GGCPG

SEQ ID NO: 9942 - protein, 5 aa, Homo sapiens
RVFMS

SEQ ID NO: 9943 - protein, 5 aa, Homo sapiens
VYSVM

SEQ ID NO: 9944 - protein, 5 aa, Homo sapiens
EGIIY

SEQ ID NO: 9945 - protein, 5 aa, Homo sapiens
KAKGK

SEQ ID NO: 9946 - protein, 5 aa, Homo sapiens
EVHDD

SEQ ID NO: 9947 - protein, 5 aa, Homo sapiens
RTHTG

SEQ ID NO: 9948 - protein, 5 aa, Homo sapiens
LEGCR

SEQ ID NO: 9949 - protein, 5 aa, Homo sapiens
KLFTW

SEQ ID NO: 9950 - protein, 5 aa, Homo sapiens
NATRL

SEQ ID NO: 9951 - protein, 5 aa, Homo sapiens
FVQKE

SEQ ID NO: 9952 - protein, 5 aa, Homo sapiens
DEIHF

SEQ ID NO: 9953 - protein, 5 aa, Homo sapiens
CGTTA

SEQ ID NO: 9954 - protein, 5 aa, Homo sapiens
SLGEK

SEQ ID NO: 9955 - protein, 5 aa, Homo sapiens
KFRPY

SEQ ID NO: 9956 - protein, 5 aa, Homo sapiens
ELHSR

SEQ ID NO: 9957 - protein, 5 aa, Homo sapiens
VQSRC

SEQ ID NO: 9958 - protein, 5 aa, Homo sapiens
PTSRP

SEQ ID NO: 9959 - protein, 5 aa, Homo sapiens
TSGLP

SEQ ID NO: 9960 - protein, 5 aa, Homo sapiens
KKTCL

SEQ ID NO: 9961 - protein, 5 aa, Homo sapiens
HILRE

SEQ ID NO: 9962 - protein, 5 aa, Homo sapiens
VLLGS

SEQ ID NO: 9963 - protein, 5 aa, Homo sapiens
ELEEI

SEQ ID NO: 9964 - protein, 5 aa, Homo sapiens
GGKVI

SEQ ID NO: 9965 - protein, 5 aa, Homo sapiens
FSAEA

SEQ ID NO: 9966 - protein, 5 aa, Homo sapiens
REWYV

SEQ ID NO: 9967 - protein, 5 aa, Homo sapiens
ICLRS

SEQ ID NO: 9968 - protein, 5 aa, Homo sapiens
KMEDL

SEQ ID NO: 9969 - protein, 5 aa, Homo sapiens
AILIK

SEQ ID NO: 9970 - protein, 5 aa, Homo sapiens
EQGAP

SEQ ID NO: 9971 - protein, 5 aa, Homo sapiens
RELRL

SEQ ID NO: 9972 - protein, 5 aa, Homo sapiens
TYCVT

SEQ ID NO: 9973 - protein, 5 aa, Homo sapiens
RKADL

SEQ ID NO: 9974 - protein, 5 aa, Homo sapiens
FKEIL

SEQ ID NO: 9975 - protein, 5 aa, Homo sapiens
NNYGI

SEQ ID NO: 9976 - protein, 5 aa, Homo sapiens
EKRLF

SEQ ID NO: 9977 - protein, 5 aa, Homo sapiens
ETLDT

SEQ ID NO: 9978 - protein, 5 aa, Homo sapiens
ITSLG

SEQ ID NO: 9979 - protein, 5 aa, Homo sapiens
GRPSS

SEQ ID NO: 9980 - protein, 5 aa, Homo sapiens
SHCTV

SEQ ID NO: 9981 - protein, 5 aa, Homo sapiens
VACFT

SEQ ID NO: 9982 - protein, 5 aa, Homo sapiens
PIRRL

SEQ ID NO: 9983 - protein, 5 aa, Homo sapiens
SCLRH

SEQ ID NO: 9984 - protein, 5 aa, Homo sapiens
CPQNR

SEQ ID NO: 9985 - protein, 5 aa, Homo sapiens
MDTAL

SEQ ID NO: 9986 - protein, 5 aa, Homo sapiens
ARWTP

SEQ ID NO: 9987 - protein, 5 aa, Homo sapiens
KDMSP

SEQ ID NO: 9988 - protein, 5 aa, Homo sapiens
MKENY

SEQ ID NO: 9989 - protein, 5 aa, Homo sapiens
PRTRC

SEQ ID NO: 9990 - protein, 5 aa, Homo sapiens
SPSSE

SEQ ID NO: 9991 - protein, 5 aa, Homo sapiens
LVPSP

SEQ ID NO: 9992 - protein, 5 aa, Homo sapiens
KMSSF

SEQ ID NO: 9993 - protein, 5 aa, Homo sapiens
EASTK

SEQ ID NO: 9994 - protein, 5 aa, Homo sapiens
SLKRY

SEQ ID NO: 9995 - protein, 5 aa, Homo sapiens
QHRLW

SEQ ID NO: 9996 - protein, 5 aa, Homo sapiens
AAESV

SEQ ID NO: 9997 - protein, 5 aa, Homo sapiens
LVKLA

SEQ ID NO: 9998 - protein, 5 aa, Homo sapiens
YTSSK

SEQ ID NO: 9999 - protein, 5 aa, Homo sapiens
HSVNF

SEQ ID NO: 10000 - protein, 5 aa, Homo sapiens
LDMEA

SEQ ID NO: 10001 - protein, 5 aa, Homo sapiens
APEPR

SEQ ID NO: 10002 - protein, 5 aa, Homo sapiens
ISVCC

SEQ ID NO: 10003 - protein, 5 aa, Homo sapiens
ACPRD

SEQ ID NO: 10004 - protein, 5 aa, Homo sapiens
RENMT

SEQ ID NO: 10005 - protein, 5 aa, Homo sapiens
HQHKS

SEQ ID NO: 10006 - protein, 5 aa, Homo sapiens
LKCSV

SEQ ID NO: 10007 - protein, 5 aa, Homo sapiens
PGLAT

SEQ ID NO: 10008 - protein, 5 aa, Homo sapiens
NVSLQ

SEQ ID NO: 10009 - protein, 5 aa, Homo sapiens
KWYQF

SEQ ID NO: 10010 - protein, 5 aa, Homo sapiens
SKATF

SEQ ID NO: 10011 - protein, 5 aa, Homo sapiens
GGYSY

SEQ ID NO: 10012 - protein, 5 aa, Homo sapiens
SPTHC

SEQ ID NO: 10013 - protein, 5 aa, Homo sapiens
RQLLS

SEQ ID NO: 10014 - protein, 5 aa, Homo sapiens
QTQIY

SEQ ID NO: 10015 - protein, 5 aa, Homo sapiens
PIIQK

SEQ ID NO: 10016 - protein, 5 aa, Homo sapiens
RIHSR

SEQ ID NO: 10017 - protein, 5 aa, Homo sapiens
DAYTA

SEQ ID NO: 10018 - protein, 5 aa, Homo sapiens
QTQTY

SEQ ID NO: 10019 - protein, 5 aa, Homo sapiens
GTNRE

SEQ ID NO: 10020 - protein, 5 aa, Homo sapiens
DYLKV

SEQ ID NO: 10021 - protein, 5 aa, Homo sapiens
TPEAS

SEQ ID NO: 10022 - protein, 5 aa, Homo sapiens
LVKSQ

SEQ ID NO: 10023 - protein, 5 aa, Homo sapiens
HHLPI

SEQ ID NO: 10024 - protein, 5 aa, Homo sapiens
SPGGP

SEQ ID NO: 10025 - protein, 5 aa, Homo sapiens
KKIIY

SEQ ID NO: 10026 - protein, 5 aa, Homo sapiens
FRSEL

SEQ ID NO: 10027 - protein, 5 aa, Homo sapiens
SDNSH

SEQ ID NO: 10028 - protein, 5 aa, Homo sapiens
GAKPG

SEQ ID NO: 10029 - protein, 5 aa, Homo sapiens
SDLSA

SEQ ID NO: 10030 - protein, 5 aa, Homo sapiens
QDPQA

SEQ ID NO: 10031 - protein, 5 aa, Homo sapiens
GNTVV

SEQ ID NO: 10032 - protein, 5 aa, Homo sapiens
DAFLG

SEQ ID NO: 10033 - protein, 5 aa, Homo sapiens
AAETQ

SEQ ID NO: 10034 - protein, 5 aa, Homo sapiens
HVLDV

SEQ ID NO: 10035 - protein, 5 aa, Homo sapiens
IHTRF

SEQ ID NO: 10036 - protein, 5 aa, Homo sapiens
CAPFP

SEQ ID NO: 10037 - protein, 5 aa, Homo sapiens
FTMAL

SEQ ID NO: 10038 - protein, 5 aa, Homo sapiens
TDEDD

SEQ ID NO: 10039 - protein, 5 aa, Homo sapiens
KRKKK

SEQ ID NO: 10040 - protein, 5 aa, Homo sapiens
LRRRF

SEQ ID NO: 10041 - protein, 5 aa, Homo sapiens
EFVLL

SEQ ID NO: 10042 - protein, 5 aa, Homo sapiens
QRCWC

SEQ ID NO: 10043 - protein, 5 aa, Homo sapiens
RKKGS

SEQ ID NO: 10044 - protein, 5 aa, Homo sapiens
RRPIS

SEQ ID NO: 10045 - protein, 5 aa, Homo sapiens
NRTKP

SEQ ID NO: 10046 - protein, 5 aa, Homo sapiens
LAPVA

SEQ ID NO: 10047 - protein, 5 aa, Homo sapiens
IRIFS

SEQ ID NO: 10048 - protein, 5 aa, Homo sapiens
AAGPK

SEQ ID NO: 10049 - protein, 5 aa, Homo sapiens
DFTER

SEQ ID NO: 10050 - protein, 5 aa, Homo sapiens
TAGKD

SEQ ID NO: 10051 - protein, 5 aa, Homo sapiens
VVHTK

SEQ ID NO: 10052 - protein, 5 aa, Homo sapiens
ELQAV

SEQ ID NO: 10053 - protein, 5 aa, Homo sapiens
EQRDV

SEQ ID NO: 10054 - protein, 5 aa, Homo sapiens
TPVQA

SEQ ID NO: 10055 - protein, 5 aa, Homo sapiens
KEEEV

SEQ ID NO: 10056 - protein, 5 aa, Homo sapiens
NIVML

SEQ ID NO: 10057 - protein, 5 aa, Homo sapiens
ADLMY

SEQ ID NO: 10058 - protein, 5 aa, Homo sapiens
PLRGA

SEQ ID NO: 10059 - protein, 5 aa, Homo sapiens
HSIDK

SEQ ID NO: 10060 - protein, 5 aa, Homo sapiens
KTSKT

SEQ ID NO: 10061 - protein, 5 aa, Homo sapiens
YRLIG

SEQ ID NO: 10062 - protein, 5 aa, Homo sapiens
LSERL

SEQ ID NO: 10063 - protein, 5 aa, Homo sapiens
FKPMK

SEQ ID NO: 10064 - protein, 5 aa, Homo sapiens
LVVMP

SEQ ID NO: 10065 - protein, 5 aa, Homo sapiens
PFPVT

SEQ ID NO: 10066 - protein, 5 aa, Homo sapiens
LQSEH

SEQ ID NO: 10067 - protein, 5 aa, Homo sapiens
DDSSD

SEQ ID NO: 10068 - protein, 5 aa, Homo sapiens
KKNKH

SEQ ID NO: 10069 - protein, 5 aa, Homo sapiens
GEGKK

SEQ ID NO: 10070 - protein, 5 aa, Homo sapiens
GKRRK

SEQ ID NO: 10071 - protein, 5 aa, Homo sapiens
DEQQL

SEQ ID NO: 10072 - protein, 5 aa, Homo sapiens
VVSHT

SEQ ID NO: 10073 - protein, 5 aa, Homo sapiens
VLRSV

SEQ ID NO: 10074 - protein, 5 aa, Homo sapiens
FGLFD

SEQ ID NO: 10075 - protein, 5 aa, Homo sapiens
TSKYR

SEQ ID NO: 10076 - protein, 5 aa, Homo sapiens
GLTTT

SEQ ID NO: 10077 - protein, 5 aa, Homo sapiens
ISAPV

SEQ ID NO: 10078 - protein, 5 aa, Homo sapiens
KLVLN

SEQ ID NO: 10079 - protein, 5 aa, Homo sapiens
TGEKP

SEQ ID NO: 10080 - protein, 5 aa, Homo sapiens
HSQPL

SEQ ID NO: 10081 - protein, 5 aa, Homo sapiens
NIKWG

SEQ ID NO: 10082 - protein, 5 aa, Homo sapiens
EVTMI

SEQ ID NO: 10083 - protein, 5 aa, Homo sapiens
RQAAS

SEQ ID NO: 10084 - protein, 5 aa, Homo sapiens
GTVCE

SEQ ID NO: 10085 - protein, 5 aa, Homo sapiens
STCCP

SEQ ID NO: 10086 - protein, 5 aa, Homo sapiens
PPSKV

SEQ ID NO: 10087 - protein, 5 aa, Homo sapiens
TGDQV

SEQ ID NO: 10088 - protein, 5 aa, Homo sapiens
SEPSS

SEQ ID NO: 10089 - protein, 5 aa, Homo sapiens
GQTST

SEQ ID NO: 10090 - protein, 5 aa, Homo sapiens
QAQVS

SEQ ID NO: 10091 - protein, 5 aa, Homo sapiens
ASPTH

SEQ ID NO: 10092 - protein, 5 aa, Homo sapiens
QGPLD

SEQ ID NO: 10093 - protein, 5 aa, Homo sapiens
PDPTW

SEQ ID NO: 10094 - protein, 5 aa, Homo sapiens
SRVTA

SEQ ID NO: 10095 - protein, 5 aa, Homo sapiens
EENLW

SEQ ID NO: 10096 - protein, 5 aa, Homo sapiens
CFWKD

SEQ ID NO: 10097 - protein, 5 aa, Homo sapiens
LVFTY

SEQ ID NO: 10098 - protein, 5 aa, Homo sapiens
KCLIR

SEQ ID NO: 10099 - protein, 5 aa, Homo sapiens
KSGEP

SEQ ID NO: 10100 - protein, 5 aa, Homo sapiens
STHRR

SEQ ID NO: 10101 - protein, 5 aa, Homo sapiens
ACCLH

SEQ ID NO: 10102 - protein, 5 aa, Homo sapiens
HAFCY

SEQ ID NO: 10103 - protein, 5 aa, Homo sapiens
KECFC

SEQ ID NO: 10104 - protein, 5 aa, Homo sapiens
VDMEI

SEQ ID NO: 10105 - protein, 5 aa, Homo sapiens
NNVQV

SEQ ID NO: 10106 - protein, 5 aa, Homo sapiens
VLWNT

SEQ ID NO: 10107 - protein, 5 aa, Homo sapiens
GKKRR

SEQ ID NO: 10108 - protein, 5 aa, Homo sapiens
VIAYN

SEQ ID NO: 10109 - protein, 5 aa, Homo sapiens
RCLAS

SEQ ID NO: 10110 - protein, 5 aa, Homo sapiens
TPWRC

SEQ ID NO: 10111 - protein, 5 aa, Homo sapiens
DAEED

SEQ ID NO: 10112 - protein, 5 aa, Homo sapiens
DVPLQ

SEQ ID NO: 10113 - protein, 5 aa, Homo sapiens
ASQMS

SEQ ID NO: 10114 - protein, 5 aa, Homo sapiens
SNGEH

SEQ ID NO: 10115 - protein, 5 aa, Homo sapiens
RAYIH

SEQ ID NO: 10116 - protein, 5 aa, Homo sapiens
KTKQI

SEQ ID NO: 10117 - protein, 5 aa, Homo sapiens
VSWVY

SEQ ID NO: 10118 - protein, 5 aa, Homo sapiens
ICGVV

SEQ ID NO: 10119 - protein, 5 aa, Homo sapiens
VGGAQ

SEQ ID NO: 10120 - protein, 5 aa, Homo sapiens
DQVLH

SEQ ID NO: 10121 - protein, 5 aa, Homo sapiens
GKKLF

SEQ ID NO: 10122 - protein, 5 aa, Homo sapiens
NCRKN

SEQ ID NO: 10123 - protein, 5 aa, Homo sapiens
AQMRV

SEQ ID NO: 10124 - protein, 5 aa, Homo sapiens
FTYDK

SEQ ID NO: 10125 - protein, 5 aa, Homo sapiens
VSQSN

SEQ ID NO: 10126 - protein, 5 aa, Homo sapiens
APRFS

SEQ ID NO: 10127 - protein, 5 aa, Homo sapiens
PESLR

SEQ ID NO: 10128 - protein, 5 aa, Homo sapiens
NSHNF

SEQ ID NO: 10129 - protein, 5 aa, Homo sapiens
NKEGK

SEQ ID NO: 10130 - protein, 5 aa, Homo sapiens
SYRPF

SEQ ID NO: 10131 - protein, 5 aa, Homo sapiens
FRKTD

SEQ ID NO: 10132 - protein, 5 aa, Homo sapiens
RVQTP

SEQ ID NO: 10133 - protein, 5 aa, Homo sapiens
ASVEV

SEQ ID NO: 10134 - protein, 5 aa, Homo sapiens
DKGAG

SEQ ID NO: 10135 - protein, 5 aa, Homo sapiens
EGSLL

SEQ ID NO: 10136 - protein, 5 aa, Homo sapiens
DDSFS

SEQ ID NO: 10137 - protein, 5 aa, Homo sapiens
CLEQQ

SEQ ID NO: 10138 - protein, 5 aa, Homo sapiens
ATHNE

SEQ ID NO: 10139 - protein, 5 aa, Homo sapiens
IVPPM

SEQ ID NO: 10140 - protein, 5 aa, Homo sapiens
NLARH

SEQ ID NO: 10141 - protein, 5 aa, Homo sapiens
VELSD

SEQ ID NO: 10142 - protein, 5 aa, Homo sapiens
VRCRC

SEQ ID NO: 10143 - protein, 5 aa, Homo sapiens
KEIRS

SEQ ID NO: 10144 - protein, 5 aa, Homo sapiens
KFCKA

SEQ ID NO: 10145 - protein, 5 aa, Homo sapiens
GSVNK

SEQ ID NO: 10146 - protein, 5 aa, Homo sapiens
ENCQL

SEQ ID NO: 10147 - protein, 5 aa, Homo sapiens
QYRHH

SEQ ID NO: 10148 - protein, 5 aa, Homo sapiens
WMFPV

SEQ ID NO: 10149 - protein, 5 aa, Homo sapiens
PALLS

SEQ ID NO: 10150 - protein, 5 aa, Homo sapiens
ASPHF

SEQ ID NO: 10151 - protein, 5 aa, Homo sapiens
SYGNI

SEQ ID NO: 10152 - protein, 5 aa, Homo sapiens
RLAES

SEQ ID NO: 10153 - protein, 5 aa, Homo sapiens
AETLP

SEQ ID NO: 10154 - protein, 5 aa, Homo sapiens
PSLAA

SEQ ID NO: 10155 - protein, 5 aa, Homo sapiens
SAANF

SEQ ID NO: 10156 - protein, 5 aa, Homo sapiens
GAPSS

SEQ ID NO: 10157 - protein, 5 aa, Homo sapiens
KLVKS

SEQ ID NO: 10158 - protein, 5 aa, Homo sapiens
AVPKL

SEQ ID NO: 10159 - protein, 5 aa, Homo sapiens
LPDSY

SEQ ID NO: 10160 - protein, 5 aa, Homo sapiens
GQAAQ

SEQ ID NO: 10161 - protein, 5 aa, Homo sapiens
QGLWE

SEQ ID NO: 10162 - protein, 5 aa, Homo sapiens
EYVPR

SEQ ID NO: 10163 - protein, 5 aa, Homo sapiens
GPMTT

SEQ ID NO: 10164 - protein, 5 aa, Homo sapiens
EVECG

SEQ ID NO: 10165 - protein, 5 aa, Homo sapiens
PRRRR

SEQ ID NO: 10166 - protein, 5 aa, Homo sapiens
LKSCV

SEQ ID NO: 10167 - protein, 5 aa, Homo sapiens
CSPKA

SEQ ID NO: 10168 - protein, 5 aa, Homo sapiens
EFSIF

SEQ ID NO: 10169 - protein, 5 aa, Homo sapiens
SNPKM

SEQ ID NO: 10170 - protein, 5 aa, Homo sapiens
TVLLD

SEQ ID NO: 10171 - protein, 5 aa, Homo sapiens
LRLCR

SEQ ID NO: 10172 - protein, 5 aa, Homo sapiens
HMRKR

SEQ ID NO: 10173 - protein, 5 aa, Homo sapiens
MSIES

SEQ ID NO: 10174 - protein, 5 aa, Homo sapiens
DKKKD

SEQ ID NO: 10175 - protein, 5 aa, Homo sapiens
PRRRR

SEQ ID NO: 10176 - protein, 5 aa, Homo sapiens
KSYSM

SEQ ID NO: 10177 - protein, 5 aa, Homo sapiens
AAFEA

SEQ ID NO: 10178 - protein, 5 aa, Homo sapiens
SGGAD

SEQ ID NO: 10179 - protein, 5 aa, Homo sapiens
KDDAS

SEQ ID NO: 10180 - protein, 5 aa, Homo sapiens
VQGYS

SEQ ID NO: 10181 - protein, 5 aa, Homo sapiens
TELKS

SEQ ID NO: 10182 - protein, 5 aa, Homo sapiens
DISAA

SEQ ID NO: 10183 - protein, 5 aa, Homo sapiens
DWQKD

SEQ ID NO: 10184 - protein, 5 aa, Homo sapiens
LEFLS

SEQ ID NO: 10185 - protein, 5 aa, Homo sapiens
VQQKS

SEQ ID NO: 10186 - protein, 5 aa, Homo sapiens
DSEQN

SEQ ID NO: 10187 - protein, 5 aa, Homo sapiens
KKEEL

SEQ ID NO: 10188 - protein, 5 aa, Homo sapiens
ESCLA

SEQ ID NO: 10189 - protein, 5 aa, Homo sapiens
IKIPK

SEQ ID NO: 10190 - protein, 5 aa, Homo sapiens
LPVIP

SEQ ID NO: 10191 - protein, 5 aa, Homo sapiens
ITGSY

SEQ ID NO: 10192 - protein, 5 aa, Homo sapiens
RHRRY

SEQ ID NO: 10193 - protein, 5 aa, Homo sapiens
KIYFS

SEQ ID NO: 10194 - protein, 5 aa, Homo sapiens
VLVVK

SEQ ID NO: 10195 - protein, 5 aa, Homo sapiens
EHPAD

SEQ ID NO: 10196 - protein, 5 aa, Homo sapiens
TDGGC

SEQ ID NO: 10197 - protein, 5 aa, Homo sapiens
AKLLK

SEQ ID NO: 10198 - protein, 5 aa, Homo sapiens
GPRKS

SEQ ID NO: 10199 - protein, 5 aa, Homo sapiens
NPNEQ

SEQ ID NO: 10200 - protein, 5 aa, Homo sapiens
KLLNL

SEQ ID NO: 10201 - protein, 5 aa, Homo sapiens
NPPTD

SEQ ID NO: 10202 - protein, 5 aa, Homo sapiens
PPGFK

SEQ ID NO: 10203 - protein, 5 aa, Homo sapiens
DQVCT

SEQ ID NO: 10204 - protein, 5 aa, Homo sapiens
LPPMP

SEQ ID NO: 10205 - protein, 5 aa, Homo sapiens
DDDQR

SEQ ID NO: 10206 - protein, 5 aa, Homo sapiens
AGRRE

SEQ ID NO: 10207 - protein, 5 aa, Homo sapiens
LLLDL

SEQ ID NO: 10208 - protein, 5 aa, Homo sapiens
TTCHY

SEQ ID NO: 10209 - protein, 5 aa, Homo sapiens
LPPTT

SEQ ID NO: 10210 - protein, 5 aa, Homo sapiens
VTVQE

SEQ ID NO: 10211 - protein, 5 aa, Homo sapiens
QFSEG

SEQ ID NO: 10212 - protein, 5 aa, Homo sapiens
PRAPA

SEQ ID NO: 10213 - protein, 5 aa, Homo sapiens
DLITL

SEQ ID NO: 10214 - protein, 5 aa, Homo sapiens
DTDMR

SEQ ID NO: 10215 - protein, 5 aa, Homo sapiens
CNIFV

SEQ ID NO: 10216 - protein, 5 aa, Homo sapiens
ASAKT

SEQ ID NO: 10217 - protein, 5 aa, Homo sapiens
ATETV

SEQ ID NO: 10218 - protein, 5 aa, Homo sapiens
PIRRH

SEQ ID NO: 10219 - protein, 5 aa, Homo sapiens
DLLPE

SEQ ID NO: 10220 - protein, 5 aa, Homo sapiens
ELEKQ

SEQ ID NO: 10221 - protein, 5 aa, Homo sapiens
NRKRQ

SEQ ID NO: 10222 - protein, 5 aa, Homo sapiens
LLFYR

SEQ ID NO: 10223 - protein, 5 aa, Homo sapiens
PLSHM

SEQ ID NO: 10224 - protein, 5 aa, Homo sapiens
RQDSR

SEQ ID NO: 10225 - protein, 5 aa, Homo sapiens
FLSKK

SEQ ID NO: 10226 - protein, 5 aa, Homo sapiens
FINKL

SEQ ID NO: 10227 - protein, 5 aa, Homo sapiens
VAYNM

SEQ ID NO: 10228 - protein, 5 aa, Homo sapiens
KKKVE

SEQ ID NO: 10229 - protein, 5 aa, Homo sapiens
YSLKI

SEQ ID NO: 10230 - protein, 5 aa, Homo sapiens
AVDSG

SEQ ID NO: 10231 - protein, 5 aa, Homo sapiens
TAGLA

SEQ ID NO: 10232 - protein, 5 aa, Homo sapiens
VNSKL

SEQ ID NO: 10233 - protein, 5 aa, Homo sapiens
FSSPQ

SEQ ID NO: 10234 - protein, 5 aa, Homo sapiens
RSNPF

SEQ ID NO: 10235 - protein, 5 aa, Homo sapiens
CTEDK

SEQ ID NO: 10236 - protein, 5 aa, Homo sapiens
FHTKK

SEQ ID NO: 10237 - protein, 5 aa, Homo sapiens
SCTLA

SEQ ID NO: 10238 - protein, 5 aa, Homo sapiens
LEETS

SEQ ID NO: 10239 - protein, 5 aa, Homo sapiens
VLTFS

SEQ ID NO: 10240 - protein, 5 aa, Homo sapiens
NKFVV

SEQ ID NO: 10241 - protein, 5 aa, Homo sapiens
PGGRP

SEQ ID NO: 10242 - protein, 5 aa, Homo sapiens
SLKLM

SEQ ID NO: 10243 - protein, 5 aa, Homo sapiens
RESPF

SEQ ID NO: 10244 - protein, 5 aa, Homo sapiens
VGDAK

SEQ ID NO: 10245 - protein, 5 aa, Homo sapiens
QPEDV

SEQ ID NO: 10246 - protein, 5 aa, Homo sapiens
RDENQ

SEQ ID NO: 10247 - protein, 5 aa, Homo sapiens
GERKR

SEQ ID NO: 10248 - protein, 5 aa, Homo sapiens
QTEGR

SEQ ID NO: 10249 - protein, 5 aa, Homo sapiens
GNGDG

SEQ ID NO: 10250 - protein, 5 aa, Homo sapiens
TRSNM

SEQ ID NO: 10251 - protein, 5 aa, Homo sapiens
CTFLP

SEQ ID NO: 10252 - protein, 5 aa, Homo sapiens
RHTQK

SEQ ID NO: 10253 - protein, 5 aa, Homo sapiens
TLQHN

SEQ ID NO: 10254 - protein, 5 aa, Homo sapiens
KRSFL

SEQ ID NO: 10255 - protein, 5 aa, Homo sapiens
YNHFC

SEQ ID NO: 10256 - protein, 5 aa, Homo sapiens
DLCCP

SEQ ID NO: 10257 - protein, 5 aa, Homo sapiens
DKYGY

SEQ ID NO: 10258 - protein, 5 aa, Homo sapiens
VLKET

SEQ ID NO: 10259 - protein, 5 aa, Homo sapiens
FFKQN

SEQ ID NO: 10260 - protein, 5 aa, Homo sapiens
ESAVA

SEQ ID NO: 10261 - protein, 5 aa, Homo sapiens
EHPSD

SEQ ID NO: 10262 - protein, 5 aa, Homo sapiens
VGAFL

SEQ ID NO: 10263 - protein, 5 aa, Homo sapiens
NAVDY

SEQ ID NO: 10264 - protein, 5 aa, Homo sapiens
ICSPK

SEQ ID NO: 10265 - protein, 5 aa, Homo sapiens
ALSLP

SEQ ID NO: 10266 - protein, 5 aa, Homo sapiens
HVPES

SEQ ID NO: 10267 - protein, 5 aa, Homo sapiens
GETTV

SEQ ID NO: 10268 - protein, 5 aa, Homo sapiens
NSLNE

SEQ ID NO: 10269 - protein, 5 aa, Homo sapiens
ANKIK

SEQ ID NO: 10270 - protein, 5 aa, Homo sapiens
EAEQC

SEQ ID NO: 10271 - protein, 5 aa, Homo sapiens
VLGNF

SEQ ID NO: 10272 - protein, 5 aa, Homo sapiens
ECEGS

SEQ ID NO: 10273 - protein, 5 aa, Homo sapiens
KAIYE

SEQ ID NO: 10274 - protein, 5 aa, Homo sapiens
DEKKE

SEQ ID NO: 10275 - protein, 5 aa, Homo sapiens
HLEIT

SEQ ID NO: 10276 - protein, 5 aa, Homo sapiens
RQDSR

SEQ ID NO: 10277 - protein, 5 aa, Homo sapiens
LPILH

SEQ ID NO: 10278 - protein, 5 aa, Homo sapiens
KTGCF

SEQ ID NO: 10279 - protein, 5 aa, Homo sapiens
KRSES

SEQ ID NO: 10280 - protein, 5 aa, Homo sapiens
GKRKR

SEQ ID NO: 10281 - protein, 5 aa, Homo sapiens
ATGLE

SEQ ID NO: 10282 - protein, 5 aa, Homo sapiens
ILRIR

SEQ ID NO: 10283 - protein, 5 aa, Homo sapiens
KAYEV

SEQ ID NO: 10284 - protein, 5 aa, Homo sapiens
EEEDD

SEQ ID NO: 10285 - protein, 5 aa, Homo sapiens
GAGHT

SEQ ID NO: 10286 - protein, 5 aa, Homo sapiens
KLEHY

SEQ ID NO: 10287 - protein, 5 aa, Homo sapiens
PVDCK

SEQ ID NO: 10288 - protein, 5 aa, Homo sapiens
NPKAK

SEQ ID NO: 10289 - protein, 5 aa, Homo sapiens
RIVNI

SEQ ID NO: 10290 - protein, 5 aa, Homo sapiens
GLMST

SEQ ID NO: 10291 - protein, 5 aa, Homo sapiens
APLEK

SEQ ID NO: 10292 - protein, 5 aa, Homo sapiens
KQKVT

SEQ ID NO: 10293 - protein, 5 aa, Homo sapiens
EKDEL

SEQ ID NO: 10294 - protein, 5 aa, Homo sapiens
LEDPW

SEQ ID NO: 10295 - protein, 5 aa, Homo sapiens
SQIKK

SEQ ID NO: 10296 - protein, 5 aa, Homo sapiens
ESKEA

SEQ ID NO: 10297 - protein, 5 aa, Homo sapiens
VGELI

SEQ ID NO: 10298 - protein, 5 aa, Homo sapiens
GVSQQ

SEQ ID NO: 10299 - protein, 5 aa, Homo sapiens
VYYIN

SEQ ID NO: 10300 - protein, 5 aa, Homo sapiens
IPVTS

SEQ ID NO: 10301 - protein, 5 aa, Homo sapiens
GFMRF

SEQ ID NO: 10302 - protein, 5 aa, Homo sapiens
TISLL

SEQ ID NO: 10303 - protein, 5 aa, Homo sapiens
QPSTA

SEQ ID NO: 10304 - protein, 5 aa, Homo sapiens
AGLFF

SEQ ID NO: 10305 - protein, 5 aa, Homo sapiens
LASCL

SEQ ID NO: 10306 - protein, 5 aa, Homo sapiens
MKHKC

SEQ ID NO: 10307 - protein, 5 aa, Homo sapiens
DTYCA

SEQ ID NO: 10308 - protein, 5 aa, Homo sapiens
CLKLA

SEQ ID NO: 10309 - protein, 5 aa, Homo sapiens
GCFYY

SEQ ID NO: 10310 - protein, 5 aa, Homo sapiens
FLFFF

SEQ ID NO: 10311 - protein, 5 aa, Homo sapiens
TIVKE

SEQ ID NO: 10312 - protein, 5 aa, Homo sapiens
PGSSR

SEQ ID NO: 10313 - protein, 5 aa, Homo sapiens
VIRKG

SEQ ID NO: 10314 - protein, 5 aa, Homo sapiens
NGAEI

SEQ ID NO: 10315 - protein, 5 aa, Homo sapiens
PQGHN

SEQ ID NO: 10316 - protein, 5 aa, Homo sapiens
KIAWN

SEQ ID NO: 10317 - protein, 5 aa, Homo sapiens
TMKNN

SEQ ID NO: 10318 - protein, 5 aa, Homo sapiens
LVEKR

SEQ ID NO: 10319 - protein, 5 aa, Homo sapiens
NWRAD

SEQ ID NO: 10320 - protein, 5 aa, Homo sapiens
SPFYR

SEQ ID NO: 10321 - protein, 5 aa, Homo sapiens
THHLP

SEQ ID NO: 10322 - protein, 5 aa, Homo sapiens
SRALT

SEQ ID NO: 10323 - protein, 5 aa, Homo sapiens
GGKAS

SEQ ID NO: 10324 - protein, 5 aa, Homo sapiens
LKDKA

SEQ ID NO: 10325 - protein, 5 aa, Homo sapiens
RTKYI

SEQ ID NO: 10326 - protein, 5 aa, Homo sapiens
SVVHR

SEQ ID NO: 10327 - protein, 5 aa, Homo sapiens
KKVFL

SEQ ID NO: 10328 - protein, 5 aa, Homo sapiens
RRWGQ

SEQ ID NO: 10329 - protein, 5 aa, Homo sapiens
TLKPL

SEQ ID NO: 10330 - protein, 5 aa, Homo sapiens
MEADP

SEQ ID NO: 10331 - protein, 5 aa, Homo sapiens
QSDAL

SEQ ID NO: 10332 - protein, 5 aa, Homo sapiens
PTSIS

SEQ ID NO: 10333 - protein, 5 aa, Homo sapiens
SVPGN

SEQ ID NO: 10334 - protein, 5 aa, Homo sapiens
GCPDQ

SEQ ID NO: 10335 - protein, 5 aa, Homo sapiens
YSENV

SEQ ID NO: 10336 - protein, 5 aa, Homo sapiens
SLASS

SEQ ID NO: 10337 - protein, 5 aa, Homo sapiens
GCTIV

SEQ ID NO: 10338 - protein, 5 aa, Homo sapiens
KPTLV

SEQ ID NO: 10339 - protein, 5 aa, Homo sapiens
GKSGD

SEQ ID NO: 10340 - protein, 5 aa, Homo sapiens
RSCAP

SEQ ID NO: 10341 - protein, 5 aa, Homo sapiens
TGICA

SEQ ID NO: 10342 - protein, 5 aa, Homo sapiens
SPARG

SEQ ID NO: 10343 - protein, 5 aa, Homo sapiens
CKALA

SEQ ID NO: 10344 - protein, 5 aa, Homo sapiens
RWPQG

SEQ ID NO: 10345 - protein, 5 aa, Homo sapiens
AHRSR

SEQ ID NO: 10346 - protein, 5 aa, Homo sapiens
TFAAH

SEQ ID NO: 10347 - protein, 5 aa, Homo sapiens
PEGIV

SEQ ID NO: 10348 - protein, 5 aa, Homo sapiens
THNVI

SEQ ID NO: 10349 - protein, 5 aa, Homo sapiens
EKETS

SEQ ID NO: 10350 - protein, 5 aa, Homo sapiens
VEKWR

SEQ ID NO: 10351 - protein, 5 aa, Homo sapiens
SGGLC

SEQ ID NO: 10352 - protein, 5 aa, Homo sapiens
CRRKK

SEQ ID NO: 10353 - protein, 5 aa, Homo sapiens
LPMVP

SEQ ID NO: 10354 - protein, 5 aa, Homo sapiens
RFLPR

SEQ ID NO: 10355 - protein, 5 aa, Homo sapiens
QVSEI

SEQ ID NO: 10356 - protein, 5 aa, Homo sapiens
AHRSR

SEQ ID NO: 10357 - protein, 5 aa, Homo sapiens
TLTEI

SEQ ID NO: 10358 - protein, 5 aa, Homo sapiens
KPQKE

SEQ ID NO: 10359 - protein, 5 aa, Homo sapiens
SLDKL

SEQ ID NO: 10360 - protein, 5 aa, Homo sapiens
WSGSC

SEQ ID NO: 10361 - protein, 5 aa, Homo sapiens
HGKNF

SEQ ID NO: 10362 - protein, 5 aa, Homo sapiens
QILDG

SEQ ID NO: 10363 - protein, 5 aa, Homo sapiens
PGENL

SEQ ID NO: 10364 - protein, 5 aa, Homo sapiens
VEPVK

SEQ ID NO: 10365 - protein, 5 aa, Homo sapiens
NRFQD

SEQ ID NO: 10366 - protein, 5 aa, Homo sapiens
LPLDI

SEQ ID NO: 10367 - protein, 5 aa, Homo sapiens
ALAGK

SEQ ID NO: 10368 - protein, 5 aa, Homo sapiens
STEGT

SEQ ID NO: 10369 - protein, 5 aa, Homo sapiens
KKGEK

SEQ ID NO: 10370 - protein, 5 aa, Homo sapiens
HGEAA

SEQ ID NO: 10371 - protein, 5 aa, Homo sapiens
IEVWG

SEQ ID NO: 10372 - protein, 5 aa, Homo sapiens
PTSAS

SEQ ID NO: 10373 - protein, 5 aa, Homo sapiens
GKSGE

SEQ ID NO: 10374 - protein, 5 aa, Homo sapiens
VLSLA

SEQ ID NO: 10375 - protein, 5 aa, Homo sapiens
ASNST

SEQ ID NO: 10376 - protein, 5 aa, Homo sapiens
PPSVS

SEQ ID NO: 10377 - protein, 5 aa, Homo sapiens
QTKEH

SEQ ID NO: 10378 - protein, 5 aa, Homo sapiens
STWNR

SEQ ID NO: 10379 - protein, 5 aa, Homo sapiens
RNQLF

SEQ ID NO: 10380 - protein, 5 aa, Homo sapiens
ELQGF

SEQ ID NO: 10381 - protein, 5 aa, Homo sapiens
ACKQQ

SEQ ID NO: 10382 - protein, 5 aa, Homo sapiens
NKYTY

SEQ ID NO: 10383 - protein, 5 aa, Homo sapiens
HPGKC

SEQ ID NO: 10384 - protein, 5 aa, Homo sapiens
GNTWN

SEQ ID NO: 10385 - protein, 5 aa, Homo sapiens
KLFIT

SEQ ID NO: 10386 - protein, 5 aa, Homo sapiens
QRPPH

SEQ ID NO: 10387 - protein, 5 aa, Homo sapiens
KLTHL

SEQ ID NO: 10388 - protein, 5 aa, Homo sapiens
AAYRS

SEQ ID NO: 10389 - protein, 5 aa, Homo sapiens
DMFWS

SEQ ID NO: 10390 - protein, 5 aa, Homo sapiens
CCKKP

SEQ ID NO: 10391 - protein, 5 aa, Homo sapiens
KFAPS

SEQ ID NO: 10392 - protein, 5 aa, Homo sapiens
KIPSS

SEQ ID NO: 10393 - protein, 5 aa, Homo sapiens
TDDKR

SEQ ID NO: 10394 - protein, 5 aa, Homo sapiens
QFTFF

SEQ ID NO: 10395 - protein, 5 aa, Homo sapiens
KRKTD

SEQ ID NO: 10396 - protein, 5 aa, Homo sapiens
AVSAN

SEQ ID NO: 10397 - protein, 5 aa, Homo sapiens
DEVED

SEQ ID NO: 10398 - protein, 5 aa, Homo sapiens
ENIKL

SEQ ID NO: 10399 - protein, 5 aa, Homo sapiens
MLSRH

SEQ ID NO: 10400 - protein, 5 aa, Homo sapiens
RGSGG

SEQ ID NO: 10401 - protein, 5 aa, Homo sapiens
NAHLH

SEQ ID NO: 10402 - protein, 5 aa, Homo sapiens
LASVG

SEQ ID NO: 10403 - protein, 5 aa, Homo sapiens
NIYHV

SEQ ID NO: 10404 - protein, 5 aa, Homo sapiens
GLYPS

SEQ ID NO: 10405 - protein, 5 aa, Homo sapiens
RRHRS

SEQ ID NO: 10406 - protein, 5 aa, Homo sapiens
RIHTH

SEQ ID NO: 10407 - protein, 5 aa, Homo sapiens
TPIRI

SEQ ID NO: 10408 - protein, 5 aa, Homo sapiens
GIIDS

SEQ ID NO: 10409 - protein, 5 aa, Homo sapiens
EKPYK

SEQ ID NO: 10410 - protein, 5 aa, Homo sapiens
VSLLM

SEQ ID NO: 10411 - protein, 5 aa, Homo sapiens
AARPH

SEQ ID NO: 10412 - protein, 5 aa, Homo sapiens
WLYHS

SEQ ID NO: 10413 - protein, 5 aa, Homo sapiens
CLFLC

SEQ ID NO: 10414 - protein, 5 aa, Homo sapiens
KNEDL

SEQ ID NO: 10415 - protein, 5 aa, Homo sapiens
LFHKK

SEQ ID NO: 10416 - protein, 5 aa, Homo sapiens
KEKLY

SEQ ID NO: 10417 - protein, 5 aa, Homo sapiens
ATNRR

SEQ ID NO: 10418 - protein, 5 aa, Homo sapiens
EAYPK

SEQ ID NO: 10419 - protein, 5 aa, Homo sapiens
LKHRI

SEQ ID NO: 10420 - protein, 5 aa, Homo sapiens
RFSSP

SEQ ID NO: 10421 - protein, 5 aa, Homo sapiens
TQTRP

SEQ ID NO: 10422 - protein, 5 aa, Homo sapiens
YPGSG

SEQ ID NO: 10423 - protein, 5 aa, Homo sapiens
HFMCV

SEQ ID NO: 10424 - protein, 5 aa, Homo sapiens
RPRPH

SEQ ID NO: 10425 - protein, 5 aa, Homo sapiens
LAQRP

SEQ ID NO: 10426 - protein, 5 aa, Homo sapiens
ESRSG

SEQ ID NO: 10427 - protein, 5 aa, Homo sapiens
FLKSW

SEQ ID NO: 10428 - protein, 5 aa, Homo sapiens
TSQRK

SEQ ID NO: 10429 - protein, 5 aa, Homo sapiens
KVFHP

SEQ ID NO: 10430 - protein, 5 aa, Homo sapiens
WGGCH

SEQ ID NO: 10431 - protein, 5 aa, Homo sapiens
AKDQE

SEQ ID NO: 10432 - protein, 5 aa, Homo sapiens
YVEAI

SEQ ID NO: 10433 - protein, 5 aa, Homo sapiens
EHSYP

SEQ ID NO: 10434 - protein, 5 aa, Homo sapiens
ATASS

SEQ ID NO: 10435 - protein, 5 aa, Homo sapiens
HSLFK

SEQ ID NO: 10436 - protein, 5 aa, Homo sapiens
TLQRS

SEQ ID NO: 10437 - protein, 5 aa, Homo sapiens
PGSRT

SEQ ID NO: 10438 - protein, 5 aa, Homo sapiens
RGDDY

SEQ ID NO: 10439 - protein, 5 aa, Homo sapiens
CKVEF

SEQ ID NO: 10440 - protein, 5 aa, Homo sapiens
TLADD

SEQ ID NO: 10441 - protein, 5 aa, Homo sapiens
SALKI

SEQ ID NO: 10442 - protein, 5 aa, Homo sapiens
DAMLD

SEQ ID NO: 10443 - protein, 5 aa, Homo sapiens
LPSFK

SEQ ID NO: 10444 - protein, 5 aa, Homo sapiens
VVTPC

SEQ ID NO: 10445 - protein, 5 aa, Homo sapiens
IDRNA

SEQ ID NO: 10446 - protein, 5 aa, Homo sapiens
GGRGR

SEQ ID NO: 10447 - protein, 5 aa, Homo sapiens
SLSPG

SEQ ID NO: 10448 - protein, 5 aa, Homo sapiens
SLLNF

SEQ ID NO: 10449 - protein, 5 aa, Homo sapiens
LTECV

SEQ ID NO: 10450 - protein, 5 aa, Homo sapiens
TKDVL

SEQ ID NO: 10451 - protein, 5 aa, Homo sapiens
RWKSP

SEQ ID NO: 10452 - protein, 5 aa, Homo sapiens
IILGS

SEQ ID NO: 10453 - protein, 5 aa, Homo sapiens
GGGSK

SEQ ID NO: 10454 - protein, 5 aa, Homo sapiens
AETHT

SEQ ID NO: 10455 - protein, 5 aa, Homo sapiens
QTVFH

SEQ ID NO: 10456 - protein, 5 aa, Homo sapiens
RVRRG

SEQ ID NO: 10457 - protein, 5 aa, Homo sapiens
DVSSL

SEQ ID NO: 10458 - protein, 5 aa, Homo sapiens
VGTSV

SEQ ID NO: 10459 - protein, 5 aa, Homo sapiens
GALAG

SEQ ID NO: 10460 - protein, 5 aa, Homo sapiens
NQSEA

SEQ ID NO: 10461 - protein, 5 aa, Homo sapiens
YWAEE

SEQ ID NO: 10462 - protein, 5 aa, Homo sapiens
LLALD

SEQ ID NO: 10463 - protein, 5 aa, Homo sapiens
EILVI

SEQ ID NO: 10464 - protein, 5 aa, Homo sapiens
NTSLL

SEQ ID NO: 10465 - protein, 5 aa, Homo sapiens
CSMGG

SEQ ID NO: 10466 - protein, 5 aa, Homo sapiens
LEGVF

SEQ ID NO: 10467 - protein, 5 aa, Homo sapiens
RYVCK

SEQ ID NO: 10468 - protein, 5 aa, Homo sapiens
QVLLH

SEQ ID NO: 10469 - protein, 5 aa, Homo sapiens
HQAFQ

SEQ ID NO: 10470 - protein, 5 aa, Homo sapiens
SQLKD

SEQ ID NO: 10471 - protein, 5 aa, Homo sapiens
IKKSE

SEQ ID NO: 10472 - protein, 5 aa, Homo sapiens
SGAEL

SEQ ID NO: 10473 - protein, 5 aa, Homo sapiens
KEQEQ

SEQ ID NO: 10474 - protein, 5 aa, Homo sapiens
YCRCP

SEQ ID NO: 10475 - protein, 5 aa, Homo sapiens
HVTAL

SEQ ID NO: 10476 - protein, 5 aa, Homo sapiens
QPLRW

SEQ ID NO: 10477 - protein, 5 aa, Homo sapiens
PEDRP

SEQ ID NO: 10478 - protein, 5 aa, Homo sapiens
RSPDT

SEQ ID NO: 10479 - protein, 5 aa, Homo sapiens
RNRYH

SEQ ID NO: 10480 - protein, 5 aa, Homo sapiens
VHETT

SEQ ID NO: 10481 - protein, 5 aa, Homo sapiens
KRTPS

SEQ ID NO: 10482 - protein, 5 aa, Homo sapiens
VYLEF

SEQ ID NO: 10483 - protein, 5 aa, Homo sapiens
RAPPY

SEQ ID NO: 10484 - protein, 5 aa, Homo sapiens
ETEDV

SEQ ID NO: 10485 - protein, 5 aa, Homo sapiens
LLLAE

SEQ ID NO: 10486 - protein, 5 aa, Homo sapiens
LVMDK

SEQ ID NO: 10487 - protein, 5 aa, Homo sapiens
RIYIS

SEQ ID NO: 10488 - protein, 5 aa, Homo sapiens
IFFLD

SEQ ID NO: 10489 - protein, 5 aa, Homo sapiens
WRLCG

SEQ ID NO: 10490 - protein, 5 aa, Homo sapiens
AFICV

SEQ ID NO: 10491 - protein, 5 aa, Homo sapiens
MHYGS

SEQ ID NO: 10492 - protein, 5 aa, Homo sapiens
SIYEV

SEQ ID NO: 10493 - protein, 5 aa, Homo sapiens
LARYR

SEQ ID NO: 10494 - protein, 5 aa, Homo sapiens
SEALP

SEQ ID NO: 10495 - protein, 5 aa, Homo sapiens
HCTLA

SEQ ID NO: 10496 - protein, 5 aa, Homo sapiens
TRSSG

SEQ ID NO: 10497 - protein, 5 aa, Homo sapiens
VAAVP

SEQ ID NO: 10498 - protein, 5 aa, Homo sapiens
LTSTR

SEQ ID NO: 10499 - protein, 5 aa, Homo sapiens
GPRDA

SEQ ID NO: 10500 - protein, 5 aa, Homo sapiens
SNLSS

SEQ ID NO: 10501 - protein, 5 aa, Homo sapiens
KYFET

SEQ ID NO: 10502 - protein, 5 aa, Homo sapiens
NIPCK

SEQ ID NO: 10503 - protein, 5 aa, Homo sapiens
AAGAL

SEQ ID NO: 10504 - protein, 5 aa, Homo sapiens
LATTC

SEQ ID NO: 10505 - protein, 5 aa, Homo sapiens
SIQCS

SEQ ID NO: 10506 - protein, 5 aa, Homo sapiens
FRAIN

SEQ ID NO: 10507 - protein, 5 aa, Homo sapiens
HLVLN

SEQ ID NO: 10508 - protein, 5 aa, Homo sapiens
KCTLM

SEQ ID NO: 10509 - protein, 5 aa, Homo sapiens
GFQCG

SEQ ID NO: 10510 - protein, 5 aa, Homo sapiens
RRNRR

SEQ ID NO: 10511 - protein, 5 aa, Homo sapiens
LETIN

SEQ ID NO: 10512 - protein, 5 aa, Homo sapiens
LVDVE

SEQ ID NO: 10513 - protein, 5 aa, Homo sapiens
MEEVD

SEQ ID NO: 10514 - protein, 5 aa, Homo sapiens
PERMD

SEQ ID NO: 10515 - protein, 5 aa, Homo sapiens
VILHG

SEQ ID NO: 10516 - protein, 5 aa, Homo sapiens
EEQIC

SEQ ID NO: 10517 - protein, 5 aa, Homo sapiens
PPALF

SEQ ID NO: 10518 - protein, 5 aa, Homo sapiens
DSLVD

SEQ ID NO: 10519 - protein, 5 aa, Homo sapiens
PGSLV

SEQ ID NO: 10520 - protein, 5 aa, Homo sapiens
PSLTR

SEQ ID NO: 10521 - protein, 5 aa, Homo sapiens
DSDPD

SEQ ID NO: 10522 - protein, 5 aa, Homo sapiens
PHPGK

SEQ ID NO: 10523 - protein, 5 aa, Homo sapiens
VISKT

SEQ ID NO: 10524 - protein, 5 aa, Homo sapiens
HGGFQ

SEQ ID NO: 10525 - protein, 5 aa, Homo sapiens
PALDD

SEQ ID NO: 10526 - protein, 5 aa, Homo sapiens
SLKRK

SEQ ID NO: 10527 - protein, 5 aa, Homo sapiens
QAAAV

SEQ ID NO: 10528 - protein, 5 aa, Homo sapiens
TFTPH

SEQ ID NO: 10529 - protein, 5 aa, Homo sapiens
MDTDI

SEQ ID NO: 10530 - protein, 5 aa, Homo sapiens
YKIHL

SEQ ID NO: 10531 - protein, 5 aa, Homo sapiens
AKAKK

SEQ ID NO: 10532 - protein, 5 aa, Homo sapiens
EGEEY

SEQ ID NO: 10533 - protein, 5 aa, Homo sapiens
PGANI

SEQ ID NO: 10534 - protein, 5 aa, Homo sapiens
TLWLS

SEQ ID NO: 10535 - protein, 5 aa, Homo sapiens
FGSSF

SEQ ID NO: 10536 - protein, 5 aa, Homo sapiens
TSGIM

SEQ ID NO: 10537 - protein, 5 aa, Homo sapiens
ELKAN

SEQ ID NO: 10538 - protein, 5 aa, Homo sapiens
AKTSI

SEQ ID NO: 10539 - protein, 5 aa, Homo sapiens
NGAQP

SEQ ID NO: 10540 - protein, 5 aa, Homo sapiens
SLSEN

SEQ ID NO: 10541 - protein, 5 aa, Homo sapiens
EESKA

SEQ ID NO: 10542 - protein, 5 aa, Homo sapiens
VASVM

SEQ ID NO: 10543 - protein, 5 aa, Homo sapiens
ARNNT

SEQ ID NO: 10544 - protein, 5 aa, Homo sapiens
VGQQP

SEQ ID NO: 10545 - protein, 5 aa, Homo sapiens
TVQAS

SEQ ID NO: 10546 - protein, 5 aa, Homo sapiens
HVFRS

SEQ ID NO: 10547 - protein, 5 aa, Homo sapiens
SCVIL

SEQ ID NO: 10548 - protein, 5 aa, Homo sapiens
ISGGE

SEQ ID NO: 10549 - protein, 5 aa, Homo sapiens
SLLSS

SEQ ID NO: 10550 - protein, 5 aa, Homo sapiens
TPSRL

SEQ ID NO: 10551 - protein, 5 aa, Homo sapiens
ALSRE

SEQ ID NO: 10552 - protein, 5 aa, Homo sapiens
EVRII

SEQ ID NO: 10553 - protein, 5 aa, Homo sapiens
GKTSI

SEQ ID NO: 10554 - protein, 5 aa, Homo sapiens
CNWII

SEQ ID NO: 10555 - protein, 5 aa, Homo sapiens
LQQLY

SEQ ID NO: 10556 - protein, 5 aa, Homo sapiens
PASHQ

SEQ ID NO: 10557 - protein, 5 aa, Homo sapiens
GQGAL

SEQ ID NO: 10558 - protein, 5 aa, Homo sapiens
DIEVI

SEQ ID NO: 10559 - protein, 5 aa, Homo sapiens
HIGEK

SEQ ID NO: 10560 - protein, 5 aa, Homo sapiens
SGSGP

SEQ ID NO: 10561 - protein, 5 aa, Homo sapiens
SKGTG

SEQ ID NO: 10562 - protein, 5 aa, Homo sapiens
GQKEA

SEQ ID NO: 10563 - protein, 5 aa, Homo sapiens
VLHFQ

SEQ ID NO: 10564 - protein, 5 aa, Homo sapiens
LTMYA

SEQ ID NO: 10565 - protein, 5 aa, Homo sapiens
PCIIL

SEQ ID NO: 10566 - protein, 5 aa, Homo sapiens
DIHAQ

SEQ ID NO: 10567 - protein, 5 aa, Homo sapiens
LSGKL

SEQ ID NO: 10568 - protein, 5 aa, Homo sapiens
ATPNL

SEQ ID NO: 10569 - protein, 5 aa, Homo sapiens
KHEYE

SEQ ID NO: 10570 - protein, 5 aa, Homo sapiens
RPRPP

SEQ ID NO: 10571 - protein, 5 aa, Homo sapiens
VVLWQ

SEQ ID NO: 10572 - protein, 5 aa, Homo sapiens
LTLKV

SEQ ID NO: 10573 - protein, 5 aa, Homo sapiens
PSEDL

SEQ ID NO: 10574 - protein, 5 aa, Homo sapiens
GVNIL

SEQ ID NO: 10575 - protein, 5 aa, Homo sapiens
HQFYI

SEQ ID NO: 10576 - protein, 5 aa, Homo sapiens
DCTKY

SEQ ID NO: 10577 - protein, 5 aa, Homo sapiens
STERI

SEQ ID NO: 10578 - protein, 5 aa, Homo sapiens
VADLI

SEQ ID NO: 10579 - protein, 5 aa, Homo sapiens
FREGT

SEQ ID NO: 10580 - protein, 5 aa, Homo sapiens
AMVPS

SEQ ID NO: 10581 - protein, 5 aa, Homo sapiens
QGCTC

SEQ ID NO: 10582 - protein, 5 aa, Homo sapiens
LGEGD

SEQ ID NO: 10583 - protein, 5 aa, Homo sapiens
FTLDD

SEQ ID NO: 10584 - protein, 5 aa, Homo sapiens
MKRHF

SEQ ID NO: 10585 - protein, 5 aa, Homo sapiens
AQEIG

SEQ ID NO: 10586 - protein, 5 aa, Homo sapiens
LDGVD

SEQ ID NO: 10587 - protein, 5 aa, Homo sapiens
VDYIL

SEQ ID NO: 10588 - protein, 5 aa, Homo sapiens
IEHQG

SEQ ID NO: 10589 - protein, 5 aa, Homo sapiens
DFSSS

SEQ ID NO: 10590 - protein, 5 aa, Homo sapiens
QTYNN

SEQ ID NO: 10591 - protein, 5 aa, Homo sapiens
SEAAP

SEQ ID NO: 10592 - protein, 5 aa, Homo sapiens
RKKIL

SEQ ID NO: 10593 - protein, 5 aa, Homo sapiens
EDRNS

SEQ ID NO: 10594 - protein, 5 aa, Homo sapiens
GYGWW

SEQ ID NO: 10595 - protein, 5 aa, Homo sapiens
GAPNL

SEQ ID NO: 10596 - protein, 5 aa, Homo sapiens
IAQSH

SEQ ID NO: 10597 - protein, 5 aa, Homo sapiens
RQRKY

SEQ ID NO: 10598 - protein, 5 aa, Homo sapiens
DPING

SEQ ID NO: 10599 - protein, 5 aa, Homo sapiens
FSLSF

SEQ ID NO: 10600 - protein, 5 aa, Homo sapiens
WGPGS

SEQ ID NO: 10601 - protein, 5 aa, Homo sapiens
KDKLA

SEQ ID NO: 10602 - protein, 5 aa, Homo sapiens
KMEKI

SEQ ID NO: 10603 - protein, 5 aa, Homo sapiens
KLARS

SEQ ID NO: 10604 - protein, 5 aa, Homo sapiens
KLAQI

SEQ ID NO: 10605 - protein, 5 aa, Homo sapiens
LTGSG

SEQ ID NO: 10606 - protein, 5 aa, Homo sapiens
SVLQK

SEQ ID NO: 10607 - protein, 5 aa, Homo sapiens
FLKIF

SEQ ID NO: 10608 - protein, 5 aa, Homo sapiens
WRWTS

SEQ ID NO: 10609 - protein, 5 aa, Homo sapiens
NTHTG

SEQ ID NO: 10610 - protein, 5 aa, Homo sapiens
LLAAL

SEQ ID NO: 10611 - protein, 5 aa, Homo sapiens
SKEDF

SEQ ID NO: 10612 - protein, 5 aa, Homo sapiens
ASFFP

SEQ ID NO: 10613 - protein, 5 aa, Homo sapiens
AEHVK

SEQ ID NO: 10614 - protein, 5 aa, Homo sapiens
RKMFG

SEQ ID NO: 10615 - protein, 5 aa, Homo sapiens
RIPLL

SEQ ID NO: 10616 - protein, 5 aa, Homo sapiens
IGNSI

SEQ ID NO: 10617 - protein, 5 aa, Homo sapiens
LATRH

SEQ ID NO: 10618 - protein, 5 aa, Homo sapiens
SFCSP

SEQ ID NO: 10619 - protein, 5 aa, Homo sapiens
RHLQS

SEQ ID NO: 10620 - protein, 5 aa, Homo sapiens
RVRKD

SEQ ID NO: 10621 - protein, 5 aa, Homo sapiens
RRSAP

SEQ ID NO: 10622 - protein, 5 aa, Homo sapiens
SLSGS

SEQ ID NO: 10623 - protein, 5 aa, Homo sapiens
KLDVF

SEQ ID NO: 10624 - protein, 5 aa, Homo sapiens
EVILE

SEQ ID NO: 10625 - protein, 5 aa, Homo sapiens
WRWQC

SEQ ID NO: 10626 - protein, 5 aa, Homo sapiens
YDLDT

SEQ ID NO: 10627 - protein, 5 aa, Homo sapiens
ISTVV

SEQ ID NO: 10628 - protein, 5 aa, Homo sapiens
QQRDK

SEQ ID NO: 10629 - protein, 5 aa, Homo sapiens
LTDKS

SEQ ID NO: 10630 - protein, 5 aa, Homo sapiens
YSYLA

SEQ ID NO: 10631 - protein, 5 aa, Homo sapiens
LAQNQ

SEQ ID NO: 10632 - protein, 5 aa, Homo sapiens
VTAGW

SEQ ID NO: 10633 - protein, 5 aa, Homo sapiens
NFGEV

SEQ ID NO: 10634 - protein, 5 aa, Homo sapiens
KKKFA

SEQ ID NO: 10635 - protein, 5 aa, Homo sapiens
KLSNL

SEQ ID NO: 10636 - protein, 5 aa, Homo sapiens
LKKSI

SEQ ID NO: 10637 - protein, 5 aa, Homo sapiens
EAVNS

SEQ ID NO: 10638 - protein, 5 aa, Homo sapiens
RATEK

SEQ ID NO: 10639 - protein, 5 aa, Homo sapiens
TLISK

SEQ ID NO: 10640 - protein, 5 aa, Homo sapiens
RKFNS

SEQ ID NO: 10641 - protein, 5 aa, Homo sapiens
CYLTF

SEQ ID NO: 10642 - protein, 5 aa, Homo sapiens
GINKY

SEQ ID NO: 10643 - protein, 5 aa, Homo sapiens
GDILD

SEQ ID NO: 10644 - protein, 5 aa, Homo sapiens
EGVHR

SEQ ID NO: 10645 - protein, 5 aa, Homo sapiens
ESPPS

SEQ ID NO: 10646 - protein, 5 aa, Homo sapiens
QRDIT

SEQ ID NO: 10647 - protein, 5 aa, Homo sapiens
DLNSA

SEQ ID NO: 10648 - protein, 5 aa, Homo sapiens
KPGDL

SEQ ID NO: 10649 - protein, 5 aa, Homo sapiens
KKEKK

SEQ ID NO: 10650 - protein, 5 aa, Homo sapiens
VVSLL

SEQ ID NO: 10651 - protein, 5 aa, Homo sapiens
VLVGS

SEQ ID NO: 10652 - protein, 5 aa, Homo sapiens
LAAAS

SEQ ID NO: 10653 - protein, 5 aa, Homo sapiens
MSCSP

SEQ ID NO: 10654 - protein, 5 aa, Homo sapiens
DCLLT

SEQ ID NO: 10655 - protein, 5 aa, Homo sapiens
HLKTH

SEQ ID NO: 10656 - protein, 5 aa, Homo sapiens
FDLEA

SEQ ID NO: 10657 - protein, 5 aa, Homo sapiens
PAQEL

SEQ ID NO: 10658 - protein, 5 aa, Homo sapiens
PRRRR

SEQ ID NO: 10659 - protein, 5 aa, Homo sapiens
RSLSL

SEQ ID NO: 10660 - protein, 5 aa, Homo sapiens
SVFTK

SEQ ID NO: 10661 - protein, 5 aa, Homo sapiens
GCYVM

SEQ ID NO: 10662 - protein, 5 aa, Homo sapiens
VKTLK

SEQ ID NO: 10663 - protein, 5 aa, Homo sapiens
VNPRL

SEQ ID NO: 10664 - protein, 5 aa, Homo sapiens
TISRP

SEQ ID NO: 10665 - protein, 5 aa, Homo sapiens
RSWRR

SEQ ID NO: 10666 - protein, 5 aa, Homo sapiens
KSKTH

SEQ ID NO: 10667 - protein, 5 aa, Homo sapiens
FIILP

SEQ ID NO: 10668 - protein, 5 aa, Homo sapiens
NLDPI

SEQ ID NO: 10669 - protein, 5 aa, Homo sapiens
YYGSR

SEQ ID NO: 10670 - protein, 5 aa, Homo sapiens
ADLHV

SEQ ID NO: 10671 - protein, 5 aa, Homo sapiens
KSNKK

SEQ ID NO: 10672 - protein, 5 aa, Homo sapiens
KVKVP

SEQ ID NO: 10673 - protein, 5 aa, Homo sapiens
NEIHQ

SEQ ID NO: 10674 - protein, 5 aa, Homo sapiens
RTTAV

SEQ ID NO: 10675 - protein, 5 aa, Homo sapiens
KKFGT

SEQ ID NO: 10676 - protein, 5 aa, Homo sapiens
MSSLK

SEQ ID NO: 10677 - protein, 5 aa, Homo sapiens
CRLMD

SEQ ID NO: 10678 - protein, 5 aa, Homo sapiens
KKESE

SEQ ID NO: 10679 - protein, 5 aa, Homo sapiens
AGPLR

SEQ ID NO: 10680 - protein, 5 aa, Homo sapiens
DMLPH

SEQ ID NO: 10681 - protein, 5 aa, Homo sapiens
EVSLV

SEQ ID NO: 10682 - protein, 5 aa, Homo sapiens
EMSAL

SEQ ID NO: 10683 - protein, 5 aa, Homo sapiens
TDDMW

SEQ ID NO: 10684 - protein, 5 aa, Homo sapiens
PKVLE

SEQ ID NO: 10685 - protein, 5 aa, Homo sapiens
RYGSY

SEQ ID NO: 10686 - protein, 5 aa, Homo sapiens
LNTSQ

SEQ ID NO: 10687 - protein, 5 aa, Homo sapiens
GNYKK

SEQ ID NO: 10688 - protein, 5 aa, Homo sapiens
SSAHA

SEQ ID NO: 10689 - protein, 5 aa, Homo sapiens
VQYQS

SEQ ID NO: 10690 - protein, 5 aa, Homo sapiens
RPQNT

SEQ ID NO: 10691 - protein, 5 aa, Homo sapiens
FSSPR

SEQ ID NO: 10692 - protein, 5 aa, Homo sapiens
KILLF

SEQ ID NO: 10693 - protein, 5 aa, Homo sapiens
PSACL

SEQ ID NO: 10694 - protein, 5 aa, Homo sapiens
QRGLG

SEQ ID NO: 10695 - protein, 5 aa, Homo sapiens
PGEAA

SEQ ID NO: 10696 - protein, 5 aa, Homo sapiens
EQLNK

SEQ ID NO: 10697 - protein, 5 aa, Homo sapiens
LYLML

SEQ ID NO: 10698 - protein, 5 aa, Homo sapiens
RTYSC

SEQ ID NO: 10699 - protein, 5 aa, Homo sapiens
QEHEV

SEQ ID NO: 10700 - protein, 5 aa, Homo sapiens
GQRQL

SEQ ID NO: 10701 - protein, 5 aa, Homo sapiens
AGVKE

SEQ ID NO: 10702 - protein, 5 aa, Homo sapiens
ACGCH

SEQ ID NO: 10703 - protein, 5 aa, Homo sapiens
SDLSL

SEQ ID NO: 10704 - protein, 5 aa, Homo sapiens
GTHRG

SEQ ID NO: 10705 - protein, 5 aa, Homo sapiens
KARAQ

SEQ ID NO: 10706 - protein, 5 aa, Homo sapiens
QNQGN

SEQ ID NO: 10707 - protein, 5 aa, Homo sapiens
DDDDD

SEQ ID NO: 10708 - protein, 5 aa, Homo sapiens
LRDGV

SEQ ID NO: 10709 - protein, 5 aa, Homo sapiens
FPAAV

SEQ ID NO: 10710 - protein, 5 aa, Homo sapiens
TQELW

SEQ ID NO: 10711 - protein, 5 aa, Homo sapiens
RAKIS

SEQ ID NO: 10712 - protein, 5 aa, Homo sapiens
QDVGH

SEQ ID NO: 10713 - protein, 5 aa, Homo sapiens
AGMIS

SEQ ID NO: 10714 - protein, 5 aa, Homo sapiens
TSVGF

SEQ ID NO: 10715 - protein, 5 aa, Homo sapiens
ALTEI

SEQ ID NO: 10716 - protein, 5 aa, Homo sapiens
VELPV

SEQ ID NO: 10717 - protein, 5 aa, Homo sapiens
FIKIK

SEQ ID NO: 10718 - protein, 5 aa, Homo sapiens
YSKIF

SEQ ID NO: 10719 - protein, 5 aa, Homo sapiens
KRQSF

SEQ ID NO: 10720 - protein, 5 aa, Homo sapiens
FTGEL

SEQ ID NO: 10721 - protein, 5 aa, Homo sapiens
TREKP

SEQ ID NO: 10722 - protein, 5 aa, Homo sapiens
GGWGM

SEQ ID NO: 10723 - protein, 5 aa, Homo sapiens
HRFSS

SEQ ID NO: 10724 - protein, 5 aa, Homo sapiens
ELIAL

SEQ ID NO: 10725 - protein, 5 aa, Homo sapiens
AYFLP

SEQ ID NO: 10726 - protein, 5 aa, Homo sapiens
RRMYL

SEQ ID NO: 10727 - protein, 5 aa, Homo sapiens
LGNNS

SEQ ID NO: 10728 - protein, 5 aa, Homo sapiens
FQRPK

SEQ ID NO: 10729 - protein, 5 aa, Homo sapiens
LKEKA

SEQ ID NO: 10730 - protein, 5 aa, Homo sapiens
RQSVV

SEQ ID NO: 10731 - protein, 5 aa, Homo sapiens
GQQLP

SEQ ID NO: 10732 - protein, 5 aa, Homo sapiens
AEEKQ

SEQ ID NO: 10733 - protein, 5 aa, Homo sapiens
FKRLT

SEQ ID NO: 10734 - protein, 5 aa, Homo sapiens
TTWVS

SEQ ID NO: 10735 - protein, 5 aa, Homo sapiens
GVTFT

SEQ ID NO: 10736 - protein, 5 aa, Homo sapiens
MKKRH

SEQ ID NO: 10737 - protein, 5 aa, Homo sapiens
TLQME

SEQ ID NO: 10738 - protein, 5 aa, Homo sapiens
KRHNC

SEQ ID NO: 10739 - protein, 5 aa, Homo sapiens
CCIHF

SEQ ID NO: 10740 - protein, 5 aa, Homo sapiens
RRCPG

SEQ ID NO: 10741 - protein, 5 aa, Homo sapiens
TSASR

SEQ ID NO: 10742 - protein, 5 aa, Homo sapiens
TNGVR

SEQ ID NO: 10743 - protein, 5 aa, Homo sapiens
TFWEI

SEQ ID NO: 10744 - protein, 5 aa, Homo sapiens
LISES

SEQ ID NO: 10745 - protein, 5 aa, Homo sapiens
MVKIT

SEQ ID NO: 10746 - protein, 5 aa, Homo sapiens
LHMLE

SEQ ID NO: 10747 - protein, 5 aa, Homo sapiens
SEVKA

SEQ ID NO: 10748 - protein, 5 aa, Homo sapiens
GQHPT

SEQ ID NO: 10749 - protein, 5 aa, Homo sapiens
RPKPQ

SEQ ID NO: 10750 - protein, 5 aa, Homo sapiens
LKQIE

SEQ ID NO: 10751 - protein, 5 aa, Homo sapiens
QRDAR

SEQ ID NO: 10752 - protein, 5 aa, Homo sapiens
EDRGA

SEQ ID NO: 10753 - protein, 5 aa, Homo sapiens
KETVA

SEQ ID NO: 10754 - protein, 5 aa, Homo sapiens
QPAKL

SEQ ID NO: 10755 - protein, 5 aa, Homo sapiens
TGDAK

SEQ ID NO: 10756 - protein, 5 aa, Homo sapiens
LSAQF

SEQ ID NO: 10757 - protein, 5 aa, Homo sapiens
SGFYY

SEQ ID NO: 10758 - protein, 5 aa, Homo sapiens
LLVCQ

SEQ ID NO: 10759 - protein, 5 aa, Homo sapiens
DDMYL

SEQ ID NO: 10760 - protein, 5 aa, Homo sapiens
ARISM

SEQ ID NO: 10761 - protein, 5 aa, Homo sapiens
LHPFS

SEQ ID NO: 10762 - protein, 5 aa, Homo sapiens
FVPSL

SEQ ID NO: 10763 - protein, 5 aa, Homo sapiens
RCGTP

SEQ ID NO: 10764 - protein, 5 aa, Homo sapiens
AQSPL

SEQ ID NO: 10765 - protein, 5 aa, Homo sapiens
LNSHV

SEQ ID NO: 10766 - protein, 5 aa, Homo sapiens
PALGA

SEQ ID NO: 10767 - protein, 5 aa, Homo sapiens
GIRAW

SEQ ID NO: 10768 - protein, 5 aa, Homo sapiens
FINCF

SEQ ID NO: 10769 - protein, 5 aa, Homo sapiens
LLLKY

SEQ ID NO: 10770 - protein, 5 aa, Homo sapiens
KNTYI

SEQ ID NO: 10771 - protein, 5 aa, Homo sapiens
LELQV

SEQ ID NO: 10772 - protein, 5 aa, Homo sapiens
TTDWS

SEQ ID NO: 10773 - protein, 5 aa, Homo sapiens
DSRQQ

SEQ ID NO: 10774 - protein, 5 aa, Homo sapiens
CFPFS

SEQ ID NO: 10775 - protein, 5 aa, Homo sapiens
VKDEL

SEQ ID NO: 10776 - protein, 5 aa, Homo sapiens
PGWEQ

SEQ ID NO: 10777 - protein, 5 aa, Homo sapiens
DSREP

SEQ ID NO: 10778 - protein, 5 aa, Homo sapiens
QRAKP

SEQ ID NO: 10779 - protein, 5 aa, Homo sapiens
HYMAR

SEQ ID NO: 10780 - protein, 5 aa, Homo sapiens
GMKAM

SEQ ID NO: 10781 - protein, 5 aa, Homo sapiens
RKHKF

SEQ ID NO: 10782 - protein, 5 aa, Homo sapiens
TSTHS

SEQ ID NO: 10783 - protein, 5 aa, Homo sapiens
QDSAL

SEQ ID NO: 10784 - protein, 5 aa, Homo sapiens
EFCSH

SEQ ID NO: 10785 - protein, 5 aa, Homo sapiens
LRQGT

SEQ ID NO: 10786 - protein, 5 aa, Homo sapiens
VVQKT

SEQ ID NO: 10787 - protein, 5 aa, Homo sapiens
QEWGK

SEQ ID NO: 10788 - protein, 5 aa, Homo sapiens
DQYCC

SEQ ID NO: 10789 - protein, 5 aa, Homo sapiens
PPRRP

SEQ ID NO: 10790 - protein, 5 aa, Homo sapiens
WGFYA

SEQ ID NO: 10791 - protein, 5 aa, Homo sapiens
KPHLY

SEQ ID NO: 10792 - protein, 5 aa, Homo sapiens
LTPTP

SEQ ID NO: 10793 - protein, 5 aa, Homo sapiens
AKLTA

SEQ ID NO: 10794 - protein, 5 aa, Homo sapiens
CCPGP

SEQ ID NO: 10795 - protein, 5 aa, Homo sapiens
NVPEE

SEQ ID NO: 10796 - protein, 5 aa, Homo sapiens
CLQEL

SEQ ID NO: 10797 - protein, 5 aa, Homo sapiens
QPTKL

SEQ ID NO: 10798 - protein, 5 aa, Homo sapiens
QELCP

SEQ ID NO: 10799 - protein, 5 aa, Homo sapiens
NGESH

SEQ ID NO: 10800 - protein, 5 aa, Homo sapiens
GQTSH

SEQ ID NO: 10801 - protein, 5 aa, Homo sapiens
DEKVL

SEQ ID NO: 10802 - protein, 5 aa, Homo sapiens
GLLCW

SEQ ID NO: 10803 - protein, 5 aa, Homo sapiens
ALMKA

SEQ ID NO: 10804 - protein, 5 aa, Homo sapiens
FCLMP

SEQ ID NO: 10805 - protein, 5 aa, Homo sapiens
ELTIT

SEQ ID NO: 10806 - protein, 5 aa, Homo sapiens
DALVR

SEQ ID NO: 10807 - protein, 5 aa, Homo sapiens
SNVVR

SEQ ID NO: 10808 - protein, 5 aa, Homo sapiens
LCRTP

SEQ ID NO: 10809 - protein, 5 aa, Homo sapiens
TEKLN

SEQ ID NO: 10810 - protein, 5 aa, Homo sapiens
DPVVK

SEQ ID NO: 10811 - protein, 5 aa, Homo sapiens
YGNNS

SEQ ID NO: 10812 - protein, 5 aa, Homo sapiens
LLQLA

SEQ ID NO: 10813 - protein, 5 aa, Homo sapiens
NLVKS

SEQ ID NO: 10814 - protein, 5 aa, Homo sapiens
PLNEF

SEQ ID NO: 10815 - protein, 5 aa, Homo sapiens
LPILH

SEQ ID NO: 10816 - protein, 5 aa, Homo sapiens
WSLPS

SEQ ID NO: 10817 - protein, 5 aa, Homo sapiens
TKGSP

SEQ ID NO: 10818 - protein, 5 aa, Homo sapiens
GQLTR

SEQ ID NO: 10819 - protein, 5 aa, Homo sapiens
VYLGA

SEQ ID NO: 10820 - protein, 5 aa, Homo sapiens
PRRRR

SEQ ID NO: 10821 - protein, 5 aa, Homo sapiens
LEYRQ

SEQ ID NO: 10822 - protein, 5 aa, Homo sapiens
KAPRA

SEQ ID NO: 10823 - protein, 5 aa, Homo sapiens
SINKS

SEQ ID NO: 10824 - protein, 5 aa, Homo sapiens
SAQES

SEQ ID NO: 10825 - protein, 5 aa, Homo sapiens
RAWIS

SEQ ID NO: 10826 - protein, 5 aa, Homo sapiens
SQACY

SEQ ID NO: 10827 - protein, 5 aa, Homo sapiens
FRGKQ

SEQ ID NO: 10828 - protein, 5 aa, Homo sapiens
PYCWS

SEQ ID NO: 10829 - protein, 5 aa, Homo sapiens
RESEI

SEQ ID NO: 10830 - protein, 5 aa, Homo sapiens
PVALV

SEQ ID NO: 10831 - protein, 5 aa, Homo sapiens
GSNPG

SEQ ID NO: 10832 - protein, 5 aa, Homo sapiens
PYKCE

SEQ ID NO: 10833 - protein, 5 aa, Homo sapiens
YAGKE

SEQ ID NO: 10834 - protein, 5 aa, Homo sapiens
TPRED

SEQ ID NO: 10835 - protein, 5 aa, Homo sapiens
SVWGH

SEQ ID NO: 10836 - protein, 5 aa, Homo sapiens
KLRSS

SEQ ID NO: 10837 - protein, 5 aa, Homo sapiens
CKCSC

SEQ ID NO: 10838 - protein, 5 aa, Homo sapiens
RKKRP

SEQ ID NO: 10839 - protein, 5 aa, Homo sapiens
ENIDE

SEQ ID NO: 10840 - protein, 5 aa, Homo sapiens
QMQDQ

SEQ ID NO: 10841 - protein, 5 aa, Homo sapiens
VRRVS

SEQ ID NO: 10842 - protein, 5 aa, Homo sapiens
TFLWS

SEQ ID NO: 10843 - protein, 5 aa, Homo sapiens
DGVGS

SEQ ID NO: 10844 - protein, 5 aa, Homo sapiens
LLKRL

SEQ ID NO: 10845 - protein, 5 aa, Homo sapiens
GSHYA

SEQ ID NO: 10846 - protein, 5 aa, Homo sapiens
QHPTT

SEQ ID NO: 10847 - protein, 5 aa, Homo sapiens
GERKQ

SEQ ID NO: 10848 - protein, 5 aa, Homo sapiens
ACAES

SEQ ID NO: 10849 - protein, 5 aa, Homo sapiens
RFSRR

SEQ ID NO: 10850 - protein, 5 aa, Homo sapiens
LMGLK

SEQ ID NO: 10851 - protein, 5 aa, Homo sapiens
GKNPT

SEQ ID NO: 10852 - protein, 5 aa, Homo sapiens
LRIHT

SEQ ID NO: 10853 - protein, 5 aa, Homo sapiens
LIQVV

SEQ ID NO: 10854 - protein, 5 aa, Homo sapiens
TAPLP

SEQ ID NO: 10855 - protein, 5 aa, Homo sapiens
ASSCC

SEQ ID NO: 10856 - protein, 5 aa, Homo sapiens
CCSHF

SEQ ID NO: 10857 - protein, 5 aa, Homo sapiens
RTGAS

SEQ ID NO: 10858 - protein, 5 aa, Homo sapiens
ASKED

SEQ ID NO: 10859 - protein, 5 aa, Homo sapiens
RFENN

SEQ ID NO: 10860 - protein, 5 aa, Homo sapiens
YETTL

SEQ ID NO: 10861 - protein, 5 aa, Homo sapiens
KFDDI

SEQ ID NO: 10862 - protein, 5 aa, Homo sapiens
LQVYI

SEQ ID NO: 10863 - protein, 5 aa, Homo sapiens
LVRKK

SEQ ID NO: 10864 - protein, 5 aa, Homo sapiens
KQVKV

SEQ ID NO: 10865 - protein, 5 aa, Homo sapiens
SKPSR

SEQ ID NO: 10866 - protein, 5 aa, Homo sapiens
RFVRH

SEQ ID NO: 10867 - protein, 5 aa, Homo sapiens
SSQRY

SEQ ID NO: 10868 - protein, 5 aa, Homo sapiens
WAFCC

SEQ ID NO: 10869 - protein, 5 aa, Homo sapiens
ADFFL

SEQ ID NO: 10870 - protein, 5 aa, Homo sapiens
SEQFK

SEQ ID NO: 10871 - protein, 5 aa, Homo sapiens
AATPS

SEQ ID NO: 10872 - protein, 5 aa, Homo sapiens
FCCRS

SEQ ID NO: 10873 - protein, 5 aa, Homo sapiens
WPILL

SEQ ID NO: 10874 - protein, 5 aa, Homo sapiens
KKKKH

SEQ ID NO: 10875 - protein, 5 aa, Homo sapiens
IKVPS

SEQ ID NO: 10876 - protein, 5 aa, Homo sapiens
FGFLS

SEQ ID NO: 10877 - protein, 5 aa, Homo sapiens
SNLCA

SEQ ID NO: 10878 - protein, 5 aa, Homo sapiens
TSEEV

SEQ ID NO: 10879 - protein, 5 aa, Homo sapiens
ATSNS

SEQ ID NO: 10880 - protein, 5 aa, Homo sapiens
QYGII

SEQ ID NO: 10881 - protein, 5 aa, Homo sapiens
IRWNR

SEQ ID NO: 10882 - protein, 5 aa, Homo sapiens
AGLRN

SEQ ID NO: 10883 - protein, 5 aa, Homo sapiens
RSSYW

SEQ ID NO: 10884 - protein, 5 aa, Homo sapiens
RPLHK

SEQ ID NO: 10885 - protein, 5 aa, Homo sapiens
GYKLT

SEQ ID NO: 10886 - protein, 5 aa, Homo sapiens
RPSCC

SEQ ID NO: 10887 - protein, 5 aa, Homo sapiens
ASSCC

SEQ ID NO: 10888 - protein, 5 aa, Homo sapiens
RNPSR

SEQ ID NO: 10889 - protein, 5 aa, Homo sapiens
LLSKC

SEQ ID NO: 10890 - protein, 5 aa, Homo sapiens
QLREE

SEQ ID NO: 10891 - protein, 5 aa, Homo sapiens
EPAAD

SEQ ID NO: 10892 - protein, 5 aa, Homo sapiens
AADEP

SEQ ID NO: 10893 - protein, 5 aa, Homo sapiens
HHKTK

SEQ ID NO: 10894 - protein, 5 aa, Homo sapiens
SAASL

SEQ ID NO: 10895 - protein, 5 aa, Homo sapiens
AGDSQ

SEQ ID NO: 10896 - protein, 5 aa, Homo sapiens
VETDV

SEQ ID NO: 10897 - protein, 5 aa, Homo sapiens
VHGAE

SEQ ID NO: 10898 - protein, 5 aa, Homo sapiens
GKVQP

SEQ ID NO: 10899 - protein, 5 aa, Homo sapiens
KGIDI

SEQ ID NO: 10900 - protein, 5 aa, Homo sapiens
QFKTK

SEQ ID NO: 10901 - protein, 5 aa, Homo sapiens
YFACE

SEQ ID NO: 10902 - protein, 5 aa, Homo sapiens
MCAVQ

SEQ ID NO: 10903 - protein, 5 aa, Homo sapiens
FPEVT

SEQ ID NO: 10904 - protein, 5 aa, Homo sapiens
CVKYS

SEQ ID NO: 10905 - protein, 5 aa, Homo sapiens
RILIQ

SEQ ID NO: 10906 - protein, 5 aa, Homo sapiens
DQDSK

SEQ ID NO: 10907 - protein, 5 aa, Homo sapiens
GVSHT

SEQ ID NO: 10908 - protein, 5 aa, Homo sapiens
RRVLW

SEQ ID NO: 10909 - protein, 5 aa, Homo sapiens
SQEPS

SEQ ID NO: 10910 - protein, 5 aa, Homo sapiens
HSSHT

SEQ ID NO: 10911 - protein, 5 aa, Homo sapiens
VRIEK

SEQ ID NO: 10912 - protein, 5 aa, Homo sapiens
SSPGA

SEQ ID NO: 10913 - protein, 5 aa, Homo sapiens
WSSVY

SEQ ID NO: 10914 - protein, 5 aa, Homo sapiens
LVNKF

SEQ ID NO: 10915 - protein, 5 aa, Homo sapiens
LYKTN

SEQ ID NO: 10916 - protein, 5 aa, Homo sapiens
ATLSC

SEQ ID NO: 10917 - protein, 5 aa, Homo sapiens
SSVLD

SEQ ID NO: 10918 - protein, 5 aa, Homo sapiens
AEGQY

SEQ ID NO: 10919 - protein, 5 aa, Homo sapiens
TKNYV

SEQ ID NO: 10920 - protein, 5 aa, Homo sapiens
LLPFL

SEQ ID NO: 10921 - protein, 5 aa, Homo sapiens
STSAN

SEQ ID NO: 10922 - protein, 5 aa, Homo sapiens
HVKER

SEQ ID NO: 10923 - protein, 5 aa, Homo sapiens
QVETR

SEQ ID NO: 10924 - protein, 5 aa, Homo sapiens
SSSAY

SEQ ID NO: 10925 - protein, 5 aa, Homo sapiens
PGTGE

SEQ ID NO: 10926 - protein, 5 aa, Homo sapiens
NVTRP

SEQ ID NO: 10927 - protein, 5 aa, Homo sapiens
KLERI

SEQ ID NO: 10928 - protein, 5 aa, Homo sapiens
SEANN

SEQ ID NO: 10929 - protein, 5 aa, Homo sapiens
AFRGS

SEQ ID NO: 10930 - protein, 5 aa, Homo sapiens
FAFRD

SEQ ID NO: 10931 - protein, 5 aa, Homo sapiens
KIGRT

SEQ ID NO: 10932 - protein, 5 aa, Homo sapiens
SQSQS

SEQ ID NO: 10933 - protein, 5 aa, Homo sapiens
RLFQA

SEQ ID NO: 10934 - protein, 5 aa, Homo sapiens
SKFGD

SEQ ID NO: 10935 - protein, 5 aa, Homo sapiens [sequence omitted]

SEQ ID NO: 10936 - protein, 5 aa, Homo sapiens
DQYCC

SEQ ID NO: 10937 - protein, 5 aa, Homo sapiens
CLAFL

SEQ ID NO: 10938 - protein, 5 aa, Homo sapiens
SQVHS

SEQ ID NO: 10939 - protein, 5 aa, Homo sapiens
FLNDI

SEQ ID NO: 10940 - protein, 5 aa, Homo sapiens
KAINV

SEQ ID NO: 10941 - protein, 5 aa, Homo sapiens
IEESC

SEQ ID NO: 10942 - protein, 5 aa, Homo sapiens
LCIWH

SEQ ID NO: 10943 - protein, 5 aa, Homo sapiens
EDFEF

SEQ ID NO: 10944 - protein, 5 aa, Homo sapiens
FSSDV

SEQ ID NO: 10945 - protein, 5 aa, Homo sapiens
HFTLS

SEQ ID NO: 10946 - protein, 5 aa, Homo sapiens
PAGKD

SEQ ID NO: 10947 - protein, 5 aa, Homo sapiens
SLDDC

SEQ ID NO: 10948 - protein, 5 aa, Homo sapiens
FQCTD

SEQ ID NO: 10949 - protein, 5 aa, Homo sapiens
VLKED

SEQ ID NO: 10950 - protein, 5 aa, Homo sapiens
LKTNH

SEQ ID NO: 10951 - protein, 5 aa, Homo sapiens
CVLDL

SEQ ID NO: 10952 - protein, 5 aa, Homo sapiens
QERLR

SEQ ID NO: 10953 - protein, 5 aa, Homo sapiens
APSGV

SEQ ID NO: 10954 - protein, 5 aa, Homo sapiens
RRKRN

SEQ ID NO: 10955 - protein, 5 aa, Homo sapiens
SHCLC

SEQ ID NO: 10956 - protein, 5 aa, Homo sapiens
GPRAL

SEQ ID NO: 10957 - protein, 5 aa, Homo sapiens
ATSDA

SEQ ID NO: 10958 - protein, 5 aa, Homo sapiens
KTIFQ

SEQ ID NO: 10959 - protein, 5 aa, Homo sapiens
LSSSS

SEQ ID NO: 10960 - protein, 5 aa, Homo sapiens
DLLET

SEQ ID NO: 10961 - protein, 5 aa, Homo sapiens
DLNEM

SEQ ID NO: 10962 - protein, 5 aa, Homo sapiens
GKSPK

SEQ ID NO: 10963 - protein, 5 aa, Homo sapiens
RESIV

SEQ ID NO: 10964 - protein, 5 aa, Homo sapiens
RIHIR

SEQ ID NO: 10965 - protein, 5 aa, Homo sapiens
SHPRN

SEQ ID NO: 10966 - protein, 5 aa, Homo sapiens
TTTTV

SEQ ID NO: 10967 - protein, 5 aa, Homo sapiens
FILWP

SEQ ID NO: 10968 - protein, 5 aa, Homo sapiens
AHPSH

SEQ ID NO: 10969 - protein, 5 aa, Homo sapiens
LIEGK

SEQ ID NO: 10970 - protein, 5 aa, Homo sapiens
QTSLR

SEQ ID NO: 10971 - protein, 5 aa, Homo sapiens
VDFRP

SEQ ID NO: 10972 - protein, 5 aa, Homo sapiens
SGGSQ

SEQ ID NO: 10973 - protein, 5 aa, Homo sapiens
SQDGR

SEQ ID NO: 10974 - protein, 5 aa, Homo sapiens
EDDGY

SEQ ID NO: 10975 - protein, 5 aa, Homo sapiens
LKCFD

SEQ ID NO: 10976 - protein, 5 aa, Homo sapiens
DKKAQ

SEQ ID NO: 10977 - protein, 5 aa, Homo sapiens
PLPPP

SEQ ID NO: 10978 - protein, 5 aa, Homo sapiens
DIKYR

SEQ ID NO: 10979 - protein, 5 aa, Homo sapiens
VAAPA

SEQ ID NO: 10980 - protein, 5 aa, Homo sapiens
GLEDK

SEQ ID NO: 10981 - protein, 5 aa, Homo sapiens
ISGDK

SEQ ID NO: 10982 - protein, 5 aa, Homo sapiens
AGLPT

SEQ ID NO: 10983 - protein, 5 aa, Homo sapiens
QFLPL

SEQ ID NO: 10984 - protein, 5 aa, Homo sapiens
PRSQK

SEQ ID NO: 10985 - protein, 5 aa, Homo sapiens
DETHS

SEQ ID NO: 10986 - protein, 5 aa, Homo sapiens
HHNSM

SEQ ID NO: 10987 - protein, 5 aa, Homo sapiens
GNLAK

SEQ ID NO: 10988 - protein, 5 aa, Homo sapiens
KSRGR

SEQ ID NO: 10989 - protein, 5 aa, Homo sapiens
SYLVS

SEQ ID NO: 10990 - protein, 5 aa, Homo sapiens
PELQP

SEQ ID NO: 10991 - protein, 5 aa, Homo sapiens
LLLGT

SEQ ID NO: 10992 - protein, 5 aa, Homo sapiens
VNTTF

SEQ ID NO: 10993 - protein, 5 aa, Homo sapiens
GNYSG

SEQ ID NO: 10994 - protein, 5 aa, Homo sapiens
EAKKS

SEQ ID NO: 10995 - protein, 5 aa, Homo sapiens
SASDK

SEQ ID NO: 10996 - protein, 5 aa, Homo sapiens
EAPEM

SEQ ID NO: 10997 - protein, 5 aa, Homo sapiens
QWPVA

SEQ ID NO: 10998 - protein, 5 aa, Homo sapiens
QSRPL

SEQ ID NO: 10999 - protein, 5 aa, Homo sapiens
QTPVQ

SEQ ID NO: 11000 - protein, 5 aa, Homo sapiens
QTAFT

SEQ ID NO: 11001 - protein, 5 aa, Homo sapiens
RARLS

SEQ ID NO: 11002 - protein, 5 aa, Homo sapiens
FLEEI

SEQ ID NO: 11003 - protein, 5 aa, Homo sapiens
VESVM

SEQ ID NO: 11004 - protein, 5 aa, Homo sapiens
QKPPY

SEQ ID NO: 11005 - protein, 5 aa, Homo sapiens
QSAGR

SEQ ID NO: 11006 - protein, 5 aa, Homo sapiens
AMFET

SEQ ID NO: 11007 - protein, 5 aa, Homo sapiens
NWTLS

SEQ ID NO: 11008 - protein, 5 aa, Homo sapiens
EVHPS

SEQ ID NO: 11009 - protein, 5 aa, Homo sapiens
PLPPE

SEQ ID NO: 11010 - protein, 5 aa, Homo sapiens
RSARD

SEQ ID NO: 11011 - protein, 5 aa, Homo sapiens
TMVKQ

SEQ ID NO: 11012 - protein, 5 aa, Homo sapiens
GQKRK

SEQ ID NO: 11013 - protein, 5 aa, Homo sapiens
FPPGF

SEQ ID NO: 11014 - protein, 5 aa, Homo sapiens
HLLEH

SEQ ID NO: 11015 - protein, 5 aa, Homo sapiens
EPAGY

SEQ ID NO: 11016 - protein, 5 aa, Homo sapiens
GARRP

SEQ ID NO: 11017 - protein, 5 aa, Homo sapiens
GRCWH

SEQ ID NO: 11018 - protein, 5 aa, Homo sapiens
QPALA

SEQ ID NO: 11019 - protein, 5 aa, Homo sapiens
PEVHG

SEQ ID NO: 11020 - protein, 5 aa, Homo sapiens
ADIHV

SEQ ID NO: 11021 - protein, 5 aa, Homo sapiens
YYPSG

SEQ ID NO: 11022 - protein, 5 aa, Homo sapiens
KSHKE

SEQ ID NO: 11023 - protein, 5 aa, Homo sapiens
GEAAT

SEQ ID NO: 11024 - protein, 5 aa, Homo sapiens
PAECS

SEQ ID NO: 11025 - protein, 5 aa, Homo sapiens
VASQN

SEQ ID NO: 11026 - protein, 5 aa, Homo sapiens
LLPDD

SEQ ID NO: 11027 - protein, 5 aa, Homo sapiens
LPLGS

SEQ ID NO: 11028 - protein, 5 aa, Homo sapiens
DQAVS

SEQ ID NO: 11029 - protein, 5 aa, Homo sapiens
PCVSS

SEQ ID NO: 11030 - protein, 5 aa, Homo sapiens
SGNGF

SEQ ID NO: 11031 - protein, 5 aa, Homo sapiens
PEPQL

SEQ ID NO: 11032 - protein, 5 aa, Homo sapiens
LIFYA

SEQ ID NO: 11033 - protein, 5 aa, Homo sapiens
KTIHT

SEQ ID NO: 11034 - protein, 5 aa, Homo sapiens
FPRAH

SEQ ID NO: 11035 - protein, 5 aa, Homo sapiens
NPTEA

SEQ ID NO: 11036 - protein, 5 aa, Homo sapiens
SGHSL

SEQ ID NO: 11037 - protein, 5 aa, Homo sapiens
RNACI

SEQ ID NO: 11038 - protein, 5 aa, Homo sapiens
GLEKD

SEQ ID NO: 11039 - protein, 5 aa, Homo sapiens
AGSQS

SEQ ID NO: 11040 - protein, 5 aa, Homo sapiens
LEQPA

SEQ ID NO: 11041 - protein, 5 aa, Homo sapiens
FPFQI

SEQ ID NO: 11042 - protein, 5 aa, Homo sapiens
DILDD

SEQ ID NO: 11043 - protein, 5 aa, Homo sapiens
RETSM

SEQ ID NO: 11044 - protein, 5 aa, Homo sapiens
YNDKF

SEQ ID NO: 11045 - protein, 5 aa, Homo sapiens
LYEVM

SEQ ID NO: 11046 - protein, 5 aa, Homo sapiens
RAHLS

SEQ ID NO: 11047 - protein, 5 aa, Homo sapiens
RRRSQ

SEQ ID NO: 11048 - protein, 5 aa, Homo sapiens
LQENW

SEQ ID NO: 11049 - protein, 5 aa, Homo sapiens
FCDHT

SEQ ID NO: 11050 - protein, 5 aa, Homo sapiens
RKKVT

SEQ ID NO: 11051 - protein, 5 aa, Homo sapiens
LCKEK

SEQ ID NO: 11052 - protein, 5 aa, Homo sapiens
LSLPA

SEQ ID NO: 11053 - protein, 5 aa, Homo sapiens
YKRPF

SEQ ID NO: 11054 - protein, 5 aa, Homo sapiens
GGLLK

SEQ ID NO: 11055 - protein, 5 aa, Homo sapiens
PSFSP

SEQ ID NO: 11056 - protein, 5 aa, Homo sapiens
KKWDH

SEQ ID NO: 11057 - protein, 5 aa, Homo sapiens
KGENQ

SEQ ID NO: 11058 - protein, 5 aa, Homo sapiens
RTLIS

SEQ ID NO: 11059 - protein, 5 aa, Homo sapiens
LLDMI

SEQ ID NO: 11060 - protein, 5 aa, Homo sapiens
VIEVS

SEQ ID NO: 11061 - protein, 5 aa, Homo sapiens
TVQKK

SEQ ID NO: 11062 - protein, 5 aa, Homo sapiens
LFSEK

SEQ ID NO: 11063 - protein, 5 aa, Homo sapiens
QREEE

SEQ ID NO: 11064 - protein, 5 aa, Homo sapiens
RGERA

SEQ ID NO: 11065 - protein, 5 aa, Homo sapiens
STQSG

SEQ ID NO: 11066 - protein, 5 aa, Homo sapiens
SQRRL

SEQ ID NO: 11067 - protein, 5 aa, Homo sapiens
RAHLS

SEQ ID NO: 11068 - protein, 5 aa, Homo sapiens
CDFFC

SEQ ID NO: 11069 - protein, 5 aa, Homo sapiens
IDIRD

SEQ ID NO: 11070 - protein, 5 aa, Homo sapiens
TYGLQ

SEQ ID NO: 11071 - protein, 5 aa, Homo sapiens
FRSPR

SEQ ID NO: 11072 - protein, 5 aa, Homo sapiens
TGGKE

SEQ ID NO: 11073 - protein, 5 aa, Homo sapiens
LFGGS

SEQ ID NO: 11074 - protein, 5 aa, Homo sapiens
AHVPE

SEQ ID NO: 11075 - protein, 5 aa, Homo sapiens
YLGHK

SEQ ID NO: 11076 - protein, 5 aa, Homo sapiens
GCWQK

SEQ ID NO: 11077 - protein, 5 aa, Homo sapiens
NPAFF

SEQ ID NO: 11078 - protein, 5 aa, Homo sapiens
ALEHF

SEQ ID NO: 11079 - protein, 5 aa, Homo sapiens
STHLN

SEQ ID NO: 11080 - protein, 5 aa, Homo sapiens
CGGDD

SEQ ID NO: 11081 - protein, 5 aa, Homo sapiens
YDVFN

SEQ ID NO: 11082 - protein, 5 aa, Homo sapiens
KNSIK

SEQ ID NO: 11083 - protein, 5 aa, Homo sapiens
PKGRK

SEQ ID NO: 11084 - protein, 5 aa, Homo sapiens
GPHSS

SEQ ID NO: 11085 - protein, 5 aa, Homo sapiens
LHSNK

SEQ ID NO: 11086 - protein, 5 aa, Homo sapiens
SGSPD

SEQ ID NO: 11087 - protein, 5 aa, Homo sapiens
TVDVA

SEQ ID NO: 11088 - protein, 5 aa, Homo sapiens
KLGLF

SEQ ID NO: 11089 - protein, 5 aa, Homo sapiens
FQNVM

SEQ ID NO: 11090 - protein, 5 aa, Homo sapiens
FAQGE

SEQ ID NO: 11091 - protein, 5 aa, Homo sapiens
PHSSS

SEQ ID NO: 11092 - protein, 5 aa, Homo sapiens
LKLVE

SEQ ID NO: 11093 - protein, 5 aa, Homo sapiens
QIVKK

SEQ ID NO: 11094 - protein, 5 aa, Homo sapiens
DVSYL

SEQ ID NO: 11095 - protein, 5 aa, Homo sapiens
REGEE

SEQ ID NO: 11096 - protein, 5 aa, Homo sapiens
THTRV

SEQ ID NO: 11097 - protein, 5 aa, Homo sapiens
LQTQI

SEQ ID NO: 11098 - protein, 5 aa, Homo sapiens
ILSTK

SEQ ID NO: 11099 - protein, 5 aa, Homo sapiens
EGQGS

SEQ ID NO: 11100 - protein, 5 aa, Homo sapiens
NAIFG

SEQ ID NO: 11101 - protein, 5 aa, Homo sapiens
LPETL

SEQ ID NO: 11102 - protein, 5 aa, Homo sapiens
RPAHR

SEQ ID NO: 11103 - protein, 5 aa, Homo sapiens
EKLQI

SEQ ID NO: 11104 - protein, 5 aa, Homo sapiens
RPYPI

SEQ ID NO: 11105 - protein, 5 aa, Homo sapiens
GIRGR

SEQ ID NO: 11106 - protein, 5 aa, Homo sapiens
KEYFI

SEQ ID NO: 11107 - protein, 5 aa, Homo sapiens
FKYII

SEQ ID NO: 11108 - protein, 5 aa, Homo sapiens
LWEGI

SEQ ID NO: 11109 - protein, 5 aa, Homo sapiens
KHARH

SEQ ID NO: 11110 - protein, 5 aa, Homo sapiens
SFGLV

SEQ ID NO: 11111 - protein, 5 aa, Homo sapiens
CPSVG

SEQ ID NO: 11112 - protein, 5 aa, Homo sapiens
LQESK

SEQ ID NO: 11113 - protein, 5 aa, Homo sapiens
RVVCL

SEQ ID NO: 11114 - protein, 5 aa, Homo sapiens
LPRAL

SEQ ID NO: 11115 - protein, 5 aa, Homo sapiens
SFRFP

SEQ ID NO: 11116 - protein, 5 aa, Homo sapiens
IIFDV

SEQ ID NO: 11117 - protein, 5 aa, Homo sapiens
RLCCR

SEQ ID NO: 11118 - protein, 5 aa, Homo sapiens
QRKED

SEQ ID NO: 11119 - protein, 5 aa, Homo sapiens
KNGDG

SEQ ID NO: 11120 - protein, 5 aa, Homo sapiens
EIINS

SEQ ID NO: 11121 - protein, 5 aa, Homo sapiens
RKYHL

SEQ ID NO: 11122 - protein, 5 aa, Homo sapiens
YMAIQ

SEQ ID NO: 11123 - protein, 5 aa, Homo sapiens
SNIYT

SEQ ID NO: 11124 - protein, 5 aa, Homo sapiens
IRIFS

SEQ ID NO: 11125 - protein, 5 aa, Homo sapiens
QSSPQ

SEQ ID NO: 11126 - protein, 5 aa, Homo sapiens
YFSKV

SEQ ID NO: 11127 - protein, 5 aa, Homo sapiens
PELFS

SEQ ID NO: 11128 - protein, 5 aa, Homo sapiens
THVQT

SEQ ID NO: 11129 - protein, 5 aa, Homo sapiens
SNSVP

SEQ ID NO: 11130 - protein, 5 aa, Homo sapiens
PEPGL

SEQ ID NO: 11131 - protein, 5 aa, Homo sapiens
IAPGP

SEQ ID NO: 11132 - protein, 5 aa, Homo sapiens
MTWMH

SEQ ID NO: 11133 - protein, 5 aa, Homo sapiens
NVDCL

SEQ ID NO: 11134 - protein, 5 aa, Homo sapiens
VLVLG

SEQ ID NO: 11135 - protein, 5 aa, Homo sapiens
EGSDS

SEQ ID NO: 11136 - protein, 5 aa, Homo sapiens
YKRIS

SEQ ID NO: 11137 - protein, 5 aa, Homo sapiens
TKTSI

SEQ ID NO: 11138 - protein, 5 aa, Homo sapiens
HPEST

SEQ ID NO: 11139 - protein, 5 aa, Homo sapiens
NPNIL

SEQ ID NO: 11140 - protein, 5 aa, Homo sapiens
RYINQ

SEQ ID NO: 11141 - protein, 5 aa, Homo sapiens
WQLVS

SEQ ID NO: 11142 - protein, 5 aa, Homo sapiens
LPVFC

SEQ ID NO: 11143 - protein, 5 aa, Homo sapiens
TAVAS

SEQ ID NO: 11144 - protein, 5 aa, Homo sapiens
RGALH

SEQ ID NO: 11145 - protein, 5 aa, Homo sapiens
RLFYL

SEQ ID NO: 11146 - protein, 5 aa, Homo sapiens
KLSKA

SEQ ID NO: 11147 - protein, 5 aa, Homo sapiens
WRGPW

SEQ ID NO: 11148 - protein, 5 aa, Homo sapiens
IPLPC

SEQ ID NO: 11149 - protein, 5 aa, Homo sapiens
EEHSD

SEQ ID NO: 11150 - protein, 5 aa, Homo sapiens
GRIIG

SEQ ID NO: 11151 - protein, 5 aa, Homo sapiens
AQKAK

SEQ ID NO: 11152 - protein, 5 aa, Homo sapiens
TVQRK

SEQ ID NO: 11153 - protein, 5 aa, Homo sapiens
APGPF

SEQ ID NO: 11154 - protein, 5 aa, Homo sapiens
RRRWT

SEQ ID NO: 11155 - protein, 5 aa, Homo sapiens
AAKKK

SEQ ID NO: 11156 - protein, 5 aa, Homo sapiens
SIAYC

SEQ ID NO: 11157 - protein, 5 aa, Homo sapiens
QAHAP

SEQ ID NO: 11158 - protein, 5 aa, Homo sapiens
PQLQD

SEQ ID NO: 11159 - protein, 5 aa, Homo sapiens
HRPFQ

SEQ ID NO: 11160 - protein, 5 aa, Homo sapiens
SPSPS

SEQ ID NO: 11161 - protein, 5 aa, Homo sapiens
RESLA

SEQ ID NO: 11162 - protein, 5 aa, Homo sapiens
HSSTK

SEQ ID NO: 11163 - protein, 5 aa, Homo sapiens
DGYYS

SEQ ID NO: 11164 - protein, 5 aa, Homo sapiens
RISYL

SEQ ID NO: 11165 - protein, 5 aa, Homo sapiens
WNSPT

SEQ ID NO: 11166 - protein, 5 aa, Homo sapiens
DPLDT

SEQ ID NO: 11167 - protein, 5 aa, Homo sapiens
HGTSI

SEQ ID NO: 11168 - protein, 5 aa, Homo sapiens
RGALS

SEQ ID NO: 11169 - protein, 5 aa, Homo sapiens
QRTQR

SEQ ID NO: 11170 - protein, 5 aa, Homo sapiens
PSQLS

SEQ ID NO: 11171 - protein, 5 aa, Homo sapiens
RRSKT

SEQ ID NO: 11172 - protein, 5 aa, Homo sapiens
LASCL

SEQ ID NO: 11173 - protein, 5 aa, Homo sapiens
YPSRI

SEQ ID NO: 11174 - protein, 5 aa, Homo sapiens
SRVAG

SEQ ID NO: 11175 - protein, 5 aa, Homo sapiens
RDGQS

SEQ ID NO: 11176 - protein, 5 aa, Homo sapiens
GMDAV

SEQ ID NO: 11177 - protein, 5 aa, Homo sapiens
KWGNG

SEQ ID NO: 11178 - protein, 5 aa, Homo sapiens
PESEL

SEQ ID NO: 11179 - protein, 5 aa, Homo sapiens
RTPDE

SEQ ID NO: 11180 - protein, 5 aa, Homo sapiens
CCIHF

SEQ ID NO: 11181 - protein, 5 aa, Homo sapiens
PLTHI

SEQ ID NO: 11182 - protein, 5 aa, Homo sapiens
SLFSD

SEQ ID NO: 11183 - protein, 5 aa, Homo sapiens
YLLYQ

SEQ ID NO: 11184 - protein, 5 aa, Homo sapiens
WTMSH

SEQ ID NO: 11185 - protein, 5 aa, Homo sapiens
CRIQR

SEQ ID NO: 11186 - protein, 5 aa, Homo sapiens
LSSAI

SEQ ID NO: 11187 - protein, 5 aa, Homo sapiens
KIHTG

SEQ ID NO: 11188 - protein, 5 aa, Homo sapiens
QHIQE

SEQ ID NO: 11189 - protein, 5 aa, Homo sapiens
NSSSF

SEQ ID NO: 11190 - protein, 5 aa, Homo sapiens
QICLS

SEQ ID NO: 11191 - protein, 5 aa, Homo sapiens
RGTQA

SEQ ID NO: 11192 - protein, 5 aa, Homo sapiens
SSRLI

SEQ ID NO: 11193 - protein, 5 aa, Homo sapiens
GPTLL

SEQ ID NO: 11194 - protein, 5 aa, Homo sapiens
KNAFS

SEQ ID NO: 11195 - protein, 5 aa, Homo sapiens
CRAAA

SEQ ID NO: 11196 - protein, 5 aa, Homo sapiens
MIQKL

SEQ ID NO: 11197 - protein, 5 aa, Homo sapiens
TPLGG

SEQ ID NO: 11198 - protein, 5 aa, Homo sapiens
REVYL

SEQ ID NO: 11199 - protein, 5 aa, Homo sapiens
KAKGK

SEQ ID NO: 11200 - protein, 5 aa, Homo sapiens
LEDNA

SEQ ID NO: 11201 - protein, 5 aa, Homo sapiens
VETFH

SEQ ID NO: 11202 - protein, 5 aa, Homo sapiens
MRADG

SEQ ID NO: 11203 - protein, 5 aa, Homo sapiens
FTQKD

SEQ ID NO: 11204 - protein, 5 aa, Homo sapiens
YDAPL

SEQ ID NO: 11205 - protein, 5 aa, Homo sapiens
KFLPL

SEQ ID NO: 11206 - protein, 5 aa, Homo sapiens
SNQII

SEQ ID NO: 11207 - protein, 5 aa, Homo sapiens
SSMDF

SEQ ID NO: 11208 - protein, 5 aa, Homo sapiens
HTGNL

SEQ ID NO: 11209 - protein, 5 aa, Homo sapiens
RFNFF

SEQ ID NO: 11210 - protein, 5 aa, Homo sapiens
EKDKI

SEQ ID NO: 11211 - protein, 5 aa, Homo sapiens
RNRAG

SEQ ID NO: 11212 - protein, 5 aa, Homo sapiens
WMSNH

SEQ ID NO: 11213 - protein, 5 aa, Homo sapiens
ETLGA

SEQ ID NO: 11214 - protein, 5 aa, Homo sapiens
ASRNV

SEQ ID NO: 11215 - protein, 5 aa, Homo sapiens
PGLFP

SEQ ID NO: 11216 - protein, 5 aa, Homo sapiens
FRLFK

SEQ ID NO: 11217 - protein, 5 aa, Homo sapiens
CDLTV

SEQ ID NO: 11218 - protein, 5 aa, Homo sapiens
PAAEL

SEQ ID NO: 11219 - protein, 5 aa, Homo sapiens
NCVIS

SEQ ID NO: 11220 - protein, 5 aa, Homo sapiens
GSLYI

SEQ ID NO: 11221 - protein, 5 aa, Homo sapiens
RTVAL

SEQ ID NO: 11222 - protein, 5 aa, Homo sapiens
ACLLF

SEQ ID NO: 11223 - protein, 5 aa, Homo sapiens
RSKDK

SEQ ID NO: 11224 - protein, 5 aa, Homo sapiens
MKSVQ

SEQ ID NO: 11225 - protein, 5 aa, Homo sapiens
SNSQK

SEQ ID NO: 11226 - protein, 5 aa, Homo sapiens
SKTGL

SEQ ID NO: 11227 - protein, 5 aa, Homo sapiens
AESKL

SEQ ID NO: 11228 - protein, 5 aa, Homo sapiens
TGLLG

SEQ ID NO: 11229 - protein, 5 aa, Homo sapiens
PDRKA

SEQ ID NO: 11230 - protein, 5 aa, Homo sapiens
CPRLA

SEQ ID NO: 11231 - protein, 5 aa, Homo sapiens
PFHSK

SEQ ID NO: 11232 - protein, 5 aa, Homo sapiens
DAYLE

SEQ ID NO: 11233 - protein, 5 aa, Homo sapiens
RDRPY

SEQ ID NO: 11234 - protein, 5 aa, Homo sapiens
EELPK

SEQ ID NO: 11235 - protein, 5 aa, Homo sapiens
RSGST

SEQ ID NO: 11236 - protein, 5 aa, Homo sapiens
GRQIY

SEQ ID NO: 11237 - protein, 5 aa, Homo sapiens
DIYLE

SEQ ID NO: 11238 - protein, 5 aa, Homo sapiens
CSCCA

SEQ ID NO: 11239 - protein, 5 aa, Homo sapiens
LSPGF

SEQ ID NO: 11240 - protein, 5 aa, Homo sapiens
EEGDK

SEQ ID NO: 11241 - protein, 5 aa, Homo sapiens
TSANL

SEQ ID NO: 11242 - protein, 5 aa, Homo sapiens
PMGLL

SEQ ID NO: 11243 - protein, 5 aa, Homo sapiens
LCSWP

SEQ ID NO: 11244 - protein, 5 aa, Homo sapiens
AVTLR

SEQ ID NO: 11245 - protein, 5 aa, Homo sapiens
GSLEL

SEQ ID NO: 11246 - protein, 5 aa, Homo sapiens
IISRN

SEQ ID NO: 11247 - protein, 5 aa, Homo sapiens
QGLAS

SEQ ID NO: 11248 - protein, 5 aa, Homo sapiens
QHTSF

SEQ ID NO: 11249 - protein, 5 aa, Homo sapiens
GYSHG

SEQ ID NO: 11250 - protein, 5 aa, Homo sapiens
VEPST

SEQ ID NO: 11251 - protein, 5 aa, Homo sapiens
VDIAA

SEQ ID NO: 11252 - protein, 5 aa, Homo sapiens
LLLEA

SEQ ID NO: 11253 - protein, 5 aa, Homo sapiens
QGLSM

SEQ ID NO: 11254 - protein, 5 aa, Homo sapiens
PAPSS

SEQ ID NO: 11255 - protein, 5 aa, Homo sapiens
RLEEL

SEQ ID NO: 11256 - protein, 5 aa, Homo sapiens
ISCKT

SEQ ID NO: 11257 - protein, 5 aa, Homo sapiens
GGCFF

SEQ ID NO: 11258 - protein, 5 aa, Homo sapiens
WGCGC

SEQ ID NO: 11259 - protein, 5 aa, Homo sapiens
CRRTC

SEQ ID NO: 11260 - protein, 5 aa, Homo sapiens
GRKGY

SEQ ID NO: 11261 - protein, 5 aa, Homo sapiens
LLGSL

SEQ ID NO: 11262 - protein, 5 aa, Homo sapiens
STPYK

SEQ ID NO: 11263 - protein, 5 aa, Homo sapiens
SCGFY

SEQ ID NO: 11264 - protein, 5 aa, Homo sapiens
KENAQ

SEQ ID NO: 11265 - protein, 5 aa, Homo sapiens
RAHLS

SEQ ID NO: 11266 - protein, 5 aa, Homo sapiens
PMAIT

SEQ ID NO: 11267 - protein, 5 aa, Homo sapiens
CCSVT

SEQ ID NO: 11268 - protein, 5 aa, Homo sapiens
TPHPP

SEQ ID NO: 11269 - protein, 5 aa, Homo sapiens
HQKIH

SEQ ID NO: 11270 - protein, 5 aa, Homo sapiens
EVTWK

SEQ ID NO: 11271 - protein, 5 aa, Homo sapiens
SSKKT

SEQ ID NO: 11272 - protein, 5 aa, Homo sapiens
SGISP

SEQ ID NO: 11273 - protein, 5 aa, Homo sapiens
LALAL

SEQ ID NO: 11274 - protein, 5 aa, Homo sapiens
SKRGK

SEQ ID NO: 11275 - protein, 5 aa, Homo sapiens
LRGEN

SEQ ID NO: 11276 - protein, 5 aa, Homo sapiens
KEEAR

SEQ ID NO: 11277 - protein, 5 aa, Homo sapiens
SRSSG

SEQ ID NO: 11278 - protein, 5 aa, Homo sapiens
AGRPV

SEQ ID NO: 11279 - protein, 5 aa, Homo sapiens
FFIKF

SEQ ID NO: 11280 - protein, 5 aa, Homo sapiens
EEEEI

SEQ ID NO: 11281 - protein, 5 aa, Homo sapiens
GLSSV

SEQ ID NO: 11282 - protein, 5 aa, Homo sapiens
KGVPV

SEQ ID NO: 11283 - protein, 5 aa, Homo sapiens
GLLRV

SEQ ID NO: 11284 - protein, 5 aa, Homo sapiens
PGHLH

SEQ ID NO: 11285 - protein, 5 aa, Homo sapiens
RFHDL

SEQ ID NO: 11286 - protein, 5 aa, Homo sapiens
MNQEK

SEQ ID NO: 11287 - protein, 5 aa, Homo sapiens
PALQG

SEQ ID NO: 11288 - protein, 5 aa, Homo sapiens
LLQLL

SEQ ID NO: 11289 - protein, 5 aa, Homo sapiens
KAILF

SEQ ID NO: 11290 - protein, 5 aa, Homo sapiens
VGHDP

SEQ ID NO: 11291 - protein, 5 aa, Homo sapiens
PQMGS

SEQ ID NO: 11292 - protein, 5 aa, Homo sapiens
AKKLV

SEQ ID NO: 11293 - protein, 5 aa, Homo sapiens
FKQIS

SEQ ID NO: 11294 - protein, 5 aa, Homo sapiens
QSYPK

SEQ ID NO: 11295 - protein, 5 aa, Homo sapiens
TKKNY

SEQ ID NO: 11296 - protein, 5 aa, Homo sapiens
SSGPL

SEQ ID NO: 11297 - protein, 5 aa, Homo sapiens
ATVDG

SEQ ID NO: 11298 - protein, 5 aa, Homo sapiens
LIQHQ

SEQ ID NO: 11299 - protein, 5 aa, Homo sapiens
TPYHY

SEQ ID NO: 11300 - protein, 5 aa, Homo sapiens
STLPY

SEQ ID NO: 11301 - protein, 5 aa, Homo sapiens
VGRLL

SEQ ID NO: 11302 - protein, 5 aa, Homo sapiens
TSDAK

SEQ ID NO: 11303 - protein, 5 aa, Homo sapiens
IANNA

SEQ ID NO: 11304 - protein, 5 aa, Homo sapiens
DALFK

SEQ ID NO: 11305 - protein, 5 aa, Homo sapiens
PMGHM

SEQ ID NO: 11306 - protein, 5 aa, Homo sapiens
EENKL

SEQ ID NO: 11307 - protein, 5 aa, Homo sapiens
GTTMD

SEQ ID NO: 11308 - protein, 5 aa, Homo sapiens
KDTHV

SEQ ID NO: 11309 - protein, 5 aa, Homo sapiens
PGAEV

SEQ ID NO: 11310 - protein, 5 aa, Homo sapiens
GYTIW

SEQ ID NO: 11311 - protein, 5 aa, Homo sapiens
TEAAC

SEQ ID NO: 11312 - protein, 5 aa, Homo sapiens
NSKLP

SEQ ID NO: 11313 - protein, 5 aa, Homo sapiens
EKEDS

SEQ ID NO: 11314 - protein, 5 aa, Homo sapiens
RERQK

SEQ ID NO: 11315 - protein, 5 aa, Homo sapiens
LLLRP

SEQ ID NO: 11316 - protein, 5 aa, Homo sapiens
MGNSG

SEQ ID NO: 11317 - protein, 5 aa, Homo sapiens
LSFTS

SEQ ID NO: 11318 - protein, 5 aa, Homo sapiens
TCRGA

SEQ ID NO: 11319 - protein, 5 aa, Homo sapiens
PNTLP

SEQ ID NO: 11320 - protein, 5 aa, Homo sapiens
STEGA

SEQ ID NO: 11321 - protein, 5 aa, Homo sapiens
RVRMK

SEQ ID NO: 11322 - protein, 5 aa, Homo sapiens
GHCII

SEQ ID NO: 11323 - protein, 5 aa, Homo sapiens
LISFD

SEQ ID NO: 11324 - protein, 5 aa, Homo sapiens
LCRTP

SEQ ID NO: 11325 - protein, 5 aa, Homo sapiens
ISVWF

SEQ ID NO: 11326 - protein, 5 aa, Homo sapiens
PMPGP

SEQ ID NO: 11327 - protein, 5 aa, Homo sapiens
GQKVS

SEQ ID NO: 11328 - protein, 5 aa, Homo sapiens
EHCST

SEQ ID NO: 11329 - protein, 5 aa, Homo sapiens
ETEDG

SEQ ID NO: 11330 - protein, 5 aa, Homo sapiens
QPRSI

SEQ ID NO: 11331 - protein, 5 aa, Homo sapiens
AREML

SEQ ID NO: 11332 - protein, 5 aa, Homo sapiens
EGLAS

SEQ ID NO: 11333 - protein, 5 aa, Homo sapiens
ARRLR

SEQ ID NO: 11334 - protein, 5 aa, Homo sapiens
LCSAP

SEQ ID NO: 11335 - protein, 5 aa, Homo sapiens
RTDFS

SEQ ID NO: 11336 - protein, 5 aa, Homo sapiens
SRTLC

SEQ ID NO: 11337 - protein, 5 aa, Homo sapiens
AMWQK

SEQ ID NO: 11338 - protein, 5 aa, Homo sapiens
MDGQR

SEQ ID NO: 11339 - protein, 5 aa, Homo sapiens
LGMAS

SEQ ID NO: 11340 - protein, 5 aa, Homo sapiens
RFSRR

SEQ ID NO: 11341 - protein, 5 aa, Homo sapiens
KNDSH

SEQ ID NO: 11342 - protein, 5 aa, Homo sapiens
VVLAN

SEQ ID NO: 11343 - protein, 5 aa, Homo sapiens
NSQLM

SEQ ID NO: 11344 - protein, 5 aa, Homo sapiens
HRKAV

SEQ ID NO: 11345 - protein, 5 aa, Homo sapiens
LYPRA

SEQ ID NO: 11346 - protein, 5 aa, Homo sapiens
LQLAL

SEQ ID NO: 11347 - protein, 5 aa, Homo sapiens
KAGKM

SEQ ID NO: 11348 - protein, 5 aa, Homo sapiens
FSNAS

SEQ ID NO: 11349 - protein, 5 aa, Homo sapiens
AEDEN

SEQ ID NO: 11350 - protein, 5 aa, Homo sapiens
MKERR

SEQ ID NO: 11351 - protein, 5 aa, Homo sapiens
RFSSP

SEQ ID NO: 11352 - protein, 5 aa, Homo sapiens
SVPKR

SEQ ID NO: 11353 - protein, 5 aa, Homo sapiens
QGEEF

SEQ ID NO: 11354 - protein, 5 aa, Homo sapiens
LPAQL

SEQ ID NO: 11355 - protein, 5 aa, Homo sapiens
ALRKF

SEQ ID NO: 11356 - protein, 5 aa, Homo sapiens
VHALG

SEQ ID NO: 11357 - protein, 5 aa, Homo sapiens
AGQAR

SEQ ID NO: 11358 - protein, 5 aa, Homo sapiens
AEGRS

SEQ ID NO: 11359 - protein, 5 aa, Homo sapiens
SPYDF

SEQ ID NO: 11360 - protein, 5 aa, Homo sapiens
YLNSG

SEQ ID NO: 11361 - protein, 5 aa, Homo sapiens
MLTGG

SEQ ID NO: 11362 - protein, 5 aa, Homo sapiens
YLFYF

SEQ ID NO: 11363 - protein, 5 aa, Homo sapiens
TVKKS

SEQ ID NO: 11364 - protein, 5 aa, Homo sapiens
LTGAV

SEQ ID NO: 11365 - protein, 5 aa, Homo sapiens
FKQIS

SEQ ID NO: 11366 - protein, 5 aa, Homo sapiens
YKRIS

SEQ ID NO: 11367 - protein, 5 aa, Homo sapiens
RDFYP

SEQ ID NO: 11368 - protein, 5 aa, Homo sapiens
QNGHG

SEQ ID NO: 11369 - protein, 5 aa, Homo sapiens
DLTEL

SEQ ID NO: 11370 - protein, 5 aa, Homo sapiens
SFFPS

SEQ ID NO: 11371 - protein, 5 aa, Homo sapiens
RKRHR

SEQ ID NO: 11372 - protein, 5 aa, Homo sapiens
HRKCF

SEQ ID NO: 11373 - protein, 5 aa, Homo sapiens
APPSH

SEQ ID NO: 11374 - protein, 5 aa, Homo sapiens
NHQVL

SEQ ID NO: 11375 - protein, 5 aa, Homo sapiens
HGGRR

SEQ ID NO: 11376 - protein, 5 aa, Homo sapiens
LSNGS

SEQ ID NO: 11377 - protein, 5 aa, Homo sapiens
IHKLL

SEQ ID NO: 11378 - protein, 5 aa, Homo sapiens
NIRAS

SEQ ID NO: 11379 - protein, 5 aa, Homo sapiens
IISRN

SEQ ID NO: 11380 - protein, 5 aa, Homo sapiens
LKKGC

SEQ ID NO: 11381 - protein, 5 aa, Homo sapiens
VHTIK

SEQ ID NO: 11382 - protein, 5 aa, Homo sapiens
TVVLS

SEQ ID NO: 11383 - protein, 5 aa, Homo sapiens
ELQEV

SEQ ID NO: 11384 - protein, 5 aa, Homo sapiens
LGPLF

SEQ ID NO: 11385 - protein, 5 aa, Homo sapiens
PYCVM

SEQ ID NO: 11386 - protein, 5 aa, Homo sapiens
HLLED

SEQ ID NO: 11387 - protein, 5 aa, Homo sapiens
AEKSE

SEQ ID NO: 11388 - protein, 5 aa, Homo sapiens
ALSSS

SEQ ID NO: 11389 - protein, 5 aa, Homo sapiens
RFHMS

SEQ ID NO: 11390 - protein, 5 aa, Homo sapiens
SELNF

SEQ ID NO: 11391 - protein, 5 aa, Homo sapiens
KPARG

SEQ ID NO: 11392 - protein, 5 aa, Homo sapiens
SWFLG

SEQ ID NO: 11393 - protein, 5 aa, Homo sapiens
FRKTF

SEQ ID NO: 11394 - protein, 5 aa, Homo sapiens
VATFS

SEQ ID NO: 11395 - protein, 5 aa, Homo sapiens
HQMLK

SEQ ID NO: 11396 - protein, 5 aa, Homo sapiens
KILGY

SEQ ID NO: 11397 - protein, 5 aa, Homo sapiens
EYHIR

SEQ ID NO: 11398 - protein, 5 aa, Homo sapiens
EIRLE

SEQ ID NO: 11399 - protein, 5 aa, Homo sapiens
PFHKN

SEQ ID NO: 11400 - protein, 5 aa, Homo sapiens
QLSWF

SEQ ID NO: 11401 - protein, 5 aa, Homo sapiens
SIWTS

SEQ ID NO: 11402 - protein, 5 aa, Homo sapiens
IISRN

SEQ ID NO: 11403 - protein, 5 aa, Homo sapiens
HMLRK

SEQ ID NO: 11404 - protein, 5 aa, Homo sapiens
DFLGP

SEQ ID NO: 11405 - protein, 5 aa, Homo sapiens
SPVPP

SEQ ID NO: 11406 - protein, 5 aa, Homo sapiens
NSSED

SEQ ID NO: 11407 - protein, 5 aa, Homo sapiens
KASDK

SEQ ID NO: 11408 - protein, 5 aa, Homo sapiens
SPVQA

SEQ ID NO: 11409 - protein, 5 aa, Homo sapiens
DHFSL

SEQ ID NO: 11410 - protein, 5 aa, Homo sapiens
LQALI

SEQ ID NO: 11411 - protein, 5 aa, Homo sapiens
QQSNV

SEQ ID NO: 11412 - protein, 5 aa, Homo sapiens
SPDSP

SEQ ID NO: 11413 - protein, 5 aa, Homo sapiens
SMTCS

SEQ ID NO: 11414 - protein, 5 aa, Homo sapiens
QRLTR

SEQ ID NO: 11415 - protein, 5 aa, Homo sapiens
LRKEV

SEQ ID NO: 11416 - protein, 5 aa, Homo sapiens
RDGDF

SEQ ID NO: 11417 - protein, 5 aa, Homo sapiens
RNRMI

SEQ ID NO: 11418 - protein, 5 aa, Homo sapiens
GLPGK

SEQ ID NO: 11419 - protein, 5 aa, Homo sapiens
CSSSK

SEQ ID NO: 11420 - protein, 5 aa, Homo sapiens
PSYIL

SEQ ID NO: 11421 - protein, 5 aa, Homo sapiens
DLQFP

SEQ ID NO: 11422 - protein, 5 aa, Homo sapiens
ECGCG

SEQ ID NO: 11423 - protein, 5 aa, Homo sapiens
PQNAN

SEQ ID NO: 11424 - protein, 5 aa, Homo sapiens
HVRCC

SEQ ID NO: 11425 - protein, 5 aa, Homo sapiens
LRPFF

SEQ ID NO: 11426 - protein, 5 aa, Homo sapiens
VRFNI

SEQ ID NO: 11427 - protein, 5 aa, Homo sapiens
VRFVL

SEQ ID NO: 11428 - protein, 5 aa, Homo sapiens
TLGRK

SEQ ID NO: 11429 - protein, 5 aa, Homo sapiens
IVLCM

SEQ ID NO: 11430 - protein, 5 aa, Homo sapiens
FGLIL

SEQ ID NO: 11431 - protein, 5 aa, Homo sapiens
GYAVK

SEQ ID NO: 11432 - protein, 5 aa, Homo sapiens
FINMY

SEQ ID NO: 11433 - protein, 5 aa, Homo sapiens
DYCPR

SEQ ID NO: 11434 - protein, 5 aa, Homo sapiens
KGALP

SEQ ID NO: 11435 - protein, 5 aa, Homo sapiens
RMDTS

SEQ ID NO: 11436 - protein, 5 aa, Homo sapiens
NNDIT

SEQ ID NO: 11437 - protein, 5 aa, Homo sapiens
DEGSL

SEQ ID NO: 11438 - protein, 5 aa, Homo sapiens
MGAGP

SEQ ID NO: 11439 - protein, 5 aa, Homo sapiens
IISRN

SEQ ID NO: 11440 - protein, 5 aa, Homo sapiens
QSSGC

SEQ ID NO: 11441 - protein, 5 aa, Homo sapiens
KKETK

SEQ ID NO: 11442 - protein, 5 aa, Homo sapiens
KNKRL

SEQ ID NO: 11443 - protein, 5 aa, Homo sapiens
RGVLL

SEQ ID NO: 11444 - protein, 5 aa, Homo sapiens
RCGST

SEQ ID NO: 11445 - protein, 5 aa, Homo sapiens
NNENI

SEQ ID NO: 11446 - protein, 5 aa, Homo sapiens
KKNYV

SEQ ID NO: 11447 - protein, 5 aa, Homo sapiens
LWLLP

SEQ ID NO: 11448 - protein, 5 aa, Homo sapiens
TFKHI

SEQ ID NO: 11449 - protein, 5 aa, Homo sapiens
ALGRQ

SEQ ID NO: 11450 - protein, 5 aa, Homo sapiens
CMKRT

SEQ ID NO: 11451 - protein, 5 aa, Homo sapiens
RKQHV

SEQ ID NO: 11452 - protein, 5 aa, Homo sapiens
GYLYL

SEQ ID NO: 11453 - protein, 5 aa, Homo sapiens
LSDEC

SEQ ID NO: 11454 - protein, 5 aa, Homo sapiens
DRCCC

SEQ ID NO: 11455 - protein, 5 aa, Homo sapiens
PKTNI

SEQ ID NO: 11456 - protein, 5 aa, Homo sapiens
GQIST

SEQ ID NO: 11457 - protein, 5 aa, Homo sapiens
DYYPR

SEQ ID NO: 11458 - protein, 5 aa, Homo sapiens
ATVQV

SEQ ID NO: 11459 - protein, 5 aa, Homo sapiens
RELGP

SEQ ID NO: 11460 - protein, 5 aa, Homo sapiens
TLSLK

SEQ ID NO: 11461 - protein, 5 aa, Homo sapiens
NSTHL

SEQ ID NO: 11462 - protein, 5 aa, Homo sapiens
EFIFV

SEQ ID NO: 11463 - protein, 5 aa, Homo sapiens
SAEAL

SEQ ID NO: 11464 - protein, 5 aa, Homo sapiens
KMTEF

SEQ ID NO: 11465 - protein, 5 aa, Homo sapiens
SGQRR

SEQ ID NO: 11466 - protein, 5 aa, Homo sapiens
ISIGE

SEQ ID NO: 11467 - protein, 5 aa, Homo sapiens
QRFST

SEQ ID NO: 11468 - protein, 5 aa, Homo sapiens
QSGWQ

SEQ ID NO: 11469 - protein, 5 aa, Homo sapiens
KEEEF

SEQ ID NO: 11470 - protein, 5 aa, Homo sapiens
SDTCF

SEQ ID NO: 11471 - protein, 5 aa, Homo sapiens
GTINL

SEQ ID NO: 11472 - protein, 5 aa, Homo sapiens
REYLH

SEQ ID NO: 11473 - protein, 5 aa, Homo sapiens
IKIFS

SEQ ID NO: 11474 - protein, 5 aa, Homo sapiens
AYIHM

SEQ ID NO: 11475 - protein, 5 aa, Homo sapiens
GPPYL

SEQ ID NO: 11476 - protein, 5 aa, Homo sapiens
AGHPV

SEQ ID NO: 11477 - protein, 5 aa, Homo sapiens
QHMFC

SEQ ID NO: 11478 - protein, 5 aa, Homo sapiens
PNSKF

SEQ ID NO: 11479 - protein, 5 aa, Homo sapiens
SPVDT

SEQ ID NO: 11480 - protein, 5 aa, Homo sapiens
KIGII

SEQ ID NO: 11481 - protein, 5 aa, Homo sapiens
LPVQV

SEQ ID NO: 11482 - protein, 5 aa, Homo sapiens
ESTEI

SEQ ID NO: 11483 - protein, 5 aa, Homo sapiens
EHSVI

SEQ ID NO: 11484 - protein, 5 aa, Homo sapiens
PSMDK

SEQ ID NO: 11485 - protein, 5 aa, Homo sapiens
LHLCC

SEQ ID NO: 11486 - protein, 5 aa, Homo sapiens
DSVLA

SEQ ID NO: 11487 - protein, 5 aa, Homo sapiens
ITRAG

SEQ ID NO: 11488 - protein, 5 aa, Homo sapiens
RVPAW

SEQ ID NO: 11489 - protein, 5 aa, Homo sapiens
RALIL

SEQ ID NO: 11490 - protein, 5 aa, Homo sapiens
SQSQC

SEQ ID NO: 11491 - protein, 5 aa, Homo sapiens
KAYNQ

SEQ ID NO: 11492 - protein, 5 aa, Homo sapiens
AQPVG

SEQ ID NO: 11493 - protein, 5 aa, Homo sapiens
CGQAD

SEQ ID NO: 11494 - protein, 5 aa, Homo sapiens
KSKQK

SEQ ID NO: 11495 - protein, 5 aa, Homo sapiens
CLACS

SEQ ID NO: 11496 - protein, 5 aa, Homo sapiens
SSPED

SEQ ID NO: 11497 - protein, 5 aa, Homo sapiens
LVNCH

SEQ ID NO: 11498 - protein, 5 aa, Homo sapiens
SKDDE

SEQ ID NO: 11499 - protein, 5 aa, Homo sapiens
GTLDR

SEQ ID NO: 11500 - protein, 5 aa, Homo sapiens
IGSQH

SEQ ID NO: 11501 - protein, 5 aa, Homo sapiens
KAKSK

SEQ ID NO: 11502 - protein, 5 aa, Homo sapiens
PRPVL

SEQ ID NO: 11503 - protein, 5 aa, Homo sapiens
RDSVV

SEQ ID NO: 11504 - protein, 5 aa, Homo sapiens
AERDA

SEQ ID NO: 11505 - protein, 5 aa, Homo sapiens
GLNPL

SEQ ID NO: 11506 - protein, 5 aa, Homo sapiens
SREDL

SEQ ID NO: 11507 - protein, 5 aa, Homo sapiens
PCWQV

SEQ ID NO: 11508 - protein, 5 aa, Homo sapiens
LVQHW

SEQ ID NO: 11509 - protein, 5 aa, Homo sapiens
DDSVA

SEQ ID NO: 11510 - protein, 5 aa, Homo sapiens
GDKNP

SEQ ID NO: 11511 - protein, 5 aa, Homo sapiens
PAAEA

SEQ ID NO: 11512 - protein, 5 aa, Homo sapiens
RCCVM

SEQ ID NO: 11513 - protein, 5 aa, Homo sapiens
QSQGY

SEQ ID NO: 11514 - protein, 5 aa, Homo sapiens
SASGS

SEQ ID NO: 11515 - protein, 5 aa, Homo sapiens
PFTGP

SEQ ID NO: 11516 - protein, 5 aa, Homo sapiens
WLGGY

SEQ ID NO: 11517 - protein, 5 aa, Homo sapiens
EFRRF

SEQ ID NO: 11518 - protein, 5 aa, Homo sapiens
ITALG

SEQ ID NO: 11519 - protein, 5 aa, Homo sapiens
TVQFW

SEQ ID NO: 11520 - protein, 5 aa, Homo sapiens
ALGYQ

SEQ ID NO: 11521 - protein, 5 aa, Homo sapiens
LIKVG

SEQ ID NO: 11522 - protein, 5 aa, Homo sapiens
LPQAT

SEQ ID NO: 11523 - protein, 5 aa, Homo sapiens
GSSSN

SEQ ID NO: 11524 - protein, 5 aa, Homo sapiens
DIPYV

SEQ ID NO: 11525 - protein, 5 aa, Homo sapiens
PSQRA

SEQ ID NO: 11526 - protein, 5 aa, Homo sapiens
VTTYA

SEQ ID NO: 11527 - protein, 5 aa, Homo sapiens
GTAQD

SEQ ID NO: 11528 - protein, 5 aa, Homo sapiens
SCALL

SEQ ID NO: 11529 - protein, 5 aa, Homo sapiens
YYLPD

SEQ ID NO: 11530 - protein, 5 aa, Homo sapiens
VILSL

SEQ ID NO: 11531 - protein, 5 aa, Homo sapiens
EESPK

SEQ ID NO: 11532 - protein, 5 aa, Homo sapiens
DTELE

SEQ ID NO: 11533 - protein, 5 aa, Homo sapiens
KQSQC

SEQ ID NO: 11534 - protein, 5 aa, Homo sapiens
SEIRR

SEQ ID NO: 11535 - protein, 5 aa, Homo sapiens
ITVLQ

SEQ ID NO: 11536 - protein, 5 aa, Homo sapiens
KSRLP

SEQ ID NO: 11537 - protein, 5 aa, Homo sapiens
RWQQW

SEQ ID NO: 11538 - protein, 5 aa, Homo sapiens
STGAS

SEQ ID NO: 11539 - protein, 5 aa, Homo sapiens
KKEEC

SEQ ID NO: 11540 - protein, 5 aa, Homo sapiens
LDPDT

SEQ ID NO: 11541 - protein, 5 aa, Homo sapiens
SHTFK

SEQ ID NO: 11542 - protein, 5 aa, Homo sapiens
VWPYK

SEQ ID NO: 11543 - protein, 5 aa, Homo sapiens
GTFNF

SEQ ID NO: 11544 - protein, 5 aa, Homo sapiens
DLPDP

SEQ ID NO: 11545 - protein, 5 aa, Homo sapiens
KRRRV

SEQ ID NO: 11546 - protein, 5 aa, Homo sapiens
LASCL

SEQ ID NO: 11547 - protein, 5 aa, Homo sapiens
TQAPL

SEQ ID NO: 11548 - protein, 5 aa, Homo sapiens
LCNHD

SEQ ID NO: 11549 - protein, 5 aa, Homo sapiens
RSGME

SEQ ID NO: 11550 - protein, 5 aa, Homo sapiens
FIIRN

SEQ ID NO: 11551 - protein, 5 aa, Homo sapiens
DMPRT

SEQ ID NO: 11552 - protein, 5 aa, Homo sapiens
LSWDN

SEQ ID NO: 11553 - protein, 5 aa, Homo sapiens
KLPLK

SEQ ID NO: 11554 - protein, 5 aa, Homo sapiens
EDEDS

SEQ ID NO: 11555 - protein, 5 aa, Homo sapiens
QTNEL

SEQ ID NO: 11556 - protein, 5 aa, Homo sapiens
VYVLS

SEQ ID NO: 11557 - protein, 5 aa, Homo sapiens
KVTVH

SEQ ID NO: 11558 - protein, 5 aa, Homo sapiens
LKNYI

SEQ ID NO: 11559 - protein, 5 aa, Homo sapiens
SISGA

SEQ ID NO: 11560 - protein, 5 aa, Homo sapiens
IESDV

SEQ ID NO: 11561 - protein, 5 aa, Homo sapiens
LTICP

SEQ ID NO: 11562 - protein, 5 aa, Homo sapiens
FDFYL

SEQ ID NO: 11563 - protein, 5 aa, Homo sapiens
HPITF

SEQ ID NO: 11564 - protein, 5 aa, Homo sapiens
EATNV

SEQ ID NO: 11565 - protein, 5 aa, Homo sapiens
VRTWS

SEQ ID NO: 11566 - protein, 5 aa, Homo sapiens
EKLQT

SEQ ID NO: 11567 - protein, 5 aa, Homo sapiens
TFLLC

SEQ ID NO: 11568 - protein, 5 aa, Homo sapiens
LANCT

SEQ ID NO: 11569 - protein, 5 aa, Homo sapiens
KKIMF

SEQ ID NO: 11570 - protein, 5 aa, Homo sapiens
SGQRR

SEQ ID NO: 11571 - protein, 5 aa, Homo sapiens
QAVVC

SEQ ID NO: 11572 - protein, 5 aa, Homo sapiens
SQTAY

SEQ ID NO: 11573 - protein, 5 aa, Homo sapiens
DPYPG

SEQ ID NO: 11574 - protein, 5 aa, Homo sapiens
TRSSP

SEQ ID NO: 11575 - protein, 5 aa, Homo sapiens
YAPEL

SEQ ID NO: 11576 - protein, 5 aa, Homo sapiens
DCGLL

SEQ ID NO: 11577 - protein, 5 aa, Homo sapiens
SVSED

SEQ ID NO: 11578 - protein, 5 aa, Homo sapiens
TLKAE

SEQ ID NO: 11579 - protein, 5 aa, Homo sapiens
VVDLT

SEQ ID NO: 11580 - protein, 5 aa, Homo sapiens
LSEVA

SEQ ID NO: 11581 - protein, 5 aa, Homo sapiens
LHDAL

SEQ ID NO: 11582 - protein, 5 aa, Homo sapiens
GPTIL

SEQ ID NO: 11583 - protein, 5 aa, Homo sapiens
ELKSM

SEQ ID NO: 11584 - protein, 5 aa, Homo sapiens
CLDKC

SEQ ID NO: 11585 - protein, 5 aa, Homo sapiens
SFLPR

SEQ ID NO: 11586 - protein, 5 aa, Homo sapiens
SGYYY

SEQ ID NO: 11587 - protein, 5 aa, Homo sapiens
LKSPA

SEQ ID NO: 11588 - protein, 5 aa, Homo sapiens
DPTVS

SEQ ID NO: 11589 - protein, 5 aa, Homo sapiens
EGEED

SEQ ID NO: 11590 - protein, 5 aa, Homo sapiens
PSTHT

SEQ ID NO: 11591 - protein, 5 aa, Homo sapiens
FTLQS

SEQ ID NO: 11592 - protein, 5 aa, Homo sapiens
RVKQL

SEQ ID NO: 11593 - protein, 5 aa, Homo sapiens
IKKKK

SEQ ID NO: 11594 - protein, 5 aa, Homo sapiens
QQFAF

SEQ ID NO: 11595 - protein, 5 aa, Homo sapiens
IPKKK

SEQ ID NO: 11596 - protein, 5 aa, Homo sapiens
FPPGF

SEQ ID NO: 11597 - protein, 5 aa, Homo sapiens
SEAEC

SEQ ID NO: 11598 - protein, 5 aa, Homo sapiens
GSGCH

SEQ ID NO: 11599 - protein, 5 aa, Homo sapiens
AWPPA

SEQ ID NO: 11600 - protein, 5 aa, Homo sapiens
ISWAT

SEQ ID NO: 11601 - protein, 5 aa, Homo sapiens
ESISV

SEQ ID NO: 11602 - protein, 5 aa, Homo sapiens
ESNVL

SEQ ID NO: 11603 - protein, 5 aa, Homo sapiens
DCLAA

SEQ ID NO: 11604 - protein, 5 aa, Homo sapiens
SEDVI

SEQ ID NO: 11605 - protein, 5 aa, Homo sapiens
PPAPK

SEQ ID NO: 11606 - protein, 5 aa, Homo sapiens
LSERE

SEQ ID NO: 11607 - protein, 5 aa, Homo sapiens
AHSEQ

SEQ ID NO: 11608 - protein, 5 aa, Homo sapiens
HQGHQ

SEQ ID NO: 11609 - protein, 5 aa, Homo sapiens
RSTDV

SEQ ID NO: 11610 - protein, 5 aa, Homo sapiens
PGKNK

SEQ ID NO: 11611 - protein, 5 aa, Homo sapiens
VRRCN

SEQ ID NO: 11612 - protein, 5 aa, Homo sapiens
PFALY

SEQ ID NO: 11613 - protein, 5 aa, Homo sapiens
PGQAN

SEQ ID NO: 11614 - protein, 5 aa, Homo sapiens
QEEVS

SEQ ID NO: 11615 - protein, 5 aa, Homo sapiens
SSTSS

SEQ ID NO: 11616 - protein, 5 aa, Homo sapiens
HPPAE

SEQ ID NO: 11617 - protein, 5 aa, Homo sapiens
EQVLM

SEQ ID NO: 11618 - protein, 5 aa, Homo sapiens
LGEKV

SEQ ID NO: 11619 - protein, 5 aa, Homo sapiens
DKLLL

SEQ ID NO: 11620 - protein, 5 aa, Homo sapiens
PDSWM

SEQ ID NO: 11621 - protein, 5 aa, Homo sapiens
KGLML

SEQ ID NO: 11622 - protein, 5 aa, Homo sapiens
AAADN

SEQ ID NO: 11623 - protein, 5 aa, Homo sapiens
RRFSV

SEQ ID NO: 11624 - protein, 5 aa, Homo sapiens
PPVLP

SEQ ID NO: 11625 - protein, 5 aa, Homo sapiens
LLGTV

SEQ ID NO: 11626 - protein, 5 aa, Homo sapiens
RVHVQ

SEQ ID NO: 11627 - protein, 5 aa, Homo sapiens
AQKAK

SEQ ID NO: 11628 - protein, 5 aa, Homo sapiens
FEFRA

SEQ ID NO: 11629 - protein, 5 aa, Homo sapiens
EHCHT

SEQ ID NO: 11630 - protein, 5 aa, Homo sapiens
CSSFD

SEQ ID NO: 11631 - protein, 5 aa, Homo sapiens
QFFRL

SEQ ID NO: 11632 - protein, 5 aa, Homo sapiens
HIKGF

SEQ ID NO: 11633 - protein, 5 aa, Homo sapiens
YMKGG

SEQ ID NO: 11634 - protein, 5 aa, Homo sapiens
QDQNN

SEQ ID NO: 11635 - protein, 5 aa, Homo sapiens
HVAML

SEQ ID NO: 11636 - protein, 5 aa, Homo sapiens
LPFLS

SEQ ID NO: 11637 - protein, 5 aa, Homo sapiens
SNSYW

SEQ ID NO: 11638 - protein, 5 aa, Homo sapiens
LRPFF

SEQ ID NO: 11639 - protein, 5 aa, Homo sapiens
CSSVS

SEQ ID NO: 11640 - protein, 5 aa, Homo sapiens
KWTPS

SEQ ID NO: 11641 - protein, 5 aa, Homo sapiens
LILVM

SEQ ID NO: 11642 - protein, 5 aa, Homo sapiens
RHRWK

SEQ ID NO: 11643 - protein, 5 aa, Homo sapiens
LNFLL

SEQ ID NO: 11644 - protein, 5 aa, Homo sapiens
PWLKH

SEQ ID NO: 11645 - protein, 5 aa, Homo sapiens
DRRRR

SEQ ID NO: 11646 - protein, 5 aa, Homo sapiens
RAILY

SEQ ID NO: 11647 - protein, 5 aa, Homo sapiens
SISDG

SEQ ID NO: 11648 - protein, 5 aa, Homo sapiens
CADSF

SEQ ID NO: 11649 - protein, 5 aa, Homo sapiens
VAKNY

SEQ ID NO: 11650 - protein, 5 aa, Homo sapiens
MIQLF

SEQ ID NO: 11651 - protein, 5 aa, Homo sapiens
CKKSK

SEQ ID NO: 11652 - protein, 5 aa, Homo sapiens
HQRCF

SEQ ID NO: 11653 - protein, 5 aa, Homo sapiens
GLLRL

SEQ ID NO: 11654 - protein, 5 aa, Homo sapiens
SPCAC

SEQ ID NO: 11655 - protein, 5 aa, Homo sapiens
CHKVE

SEQ ID NO: 11656 - protein, 5 aa, Homo sapiens
QEKDE

SEQ ID NO: 11657 - protein, 5 aa, Homo sapiens
EQPRL

SEQ ID NO: 11658 - protein, 5 aa, Homo sapiens
SEALP

SEQ ID NO: 11659 - protein, 5 aa, Homo sapiens
PTRFI

SEQ ID NO: 11660 - protein, 5 aa, Homo sapiens
SLPGV

SEQ ID NO: 11661 - protein, 5 aa, Homo sapiens
DVDEE

SEQ ID NO: 11662 - protein, 5 aa, Homo sapiens
DTLPF

SEQ ID NO: 11663 - protein, 5 aa, Homo sapiens
LLLSP

SEQ ID NO: 11664 - protein, 5 aa, Homo sapiens
SRVEA

SEQ ID NO: 11665 - protein, 5 aa, Homo sapiens
VLQQV

SEQ ID NO: 11666 - protein, 5 aa, Homo sapiens
VQAAQ

SEQ ID NO: 11667 - protein, 5 aa, Homo sapiens
KKKRY

SEQ ID NO: 11668 - protein, 5 aa, Homo sapiens
RVTSV

SEQ ID NO: 11669 - protein, 5 aa, Homo sapiens
MLTCR

SEQ ID NO: 11670 - protein, 5 aa, Homo sapiens
SRLDL

SEQ ID NO: 11671 - protein, 5 aa, Homo sapiens
EMEVK

SEQ ID NO: 11672 - protein, 5 aa, Homo sapiens
TSVWI

SEQ ID NO: 11673 - protein, 5 aa, Homo sapiens
SSSEA

SEQ ID NO: 11674 - protein, 5 aa, Homo sapiens
PQRGI

SEQ ID NO: 11675 - protein, 5 aa, Homo sapiens
KKASK

SEQ ID NO: 11676 - protein, 5 aa, Homo sapiens
DRCCC

SEQ ID NO: 11677 - protein, 5 aa, Homo sapiens
TDETL

SEQ ID NO: 11678 - protein, 5 aa, Homo sapiens
KVNRP

SEQ ID NO: 11679 - protein, 5 aa, Homo sapiens
KFSAS

SEQ ID NO: 11680 - protein, 5 aa, Homo sapiens
RRRLQ

SEQ ID NO: 11681 - protein, 5 aa, Homo sapiens
TISRR

SEQ ID NO: 11682 - protein, 5 aa, Homo sapiens
KAQGY

SEQ ID NO: 11683 - protein, 5 aa, Homo sapiens
YHQVL

SEQ ID NO: 11684 - protein, 5 aa, Homo sapiens
TPKKD

SEQ ID NO: 11685 - protein, 5 aa, Homo sapiens
GPVVK

SEQ ID NO: 11686 - protein, 5 aa, Homo sapiens
GLGRR

SEQ ID NO: 11687 - protein, 5 aa, Homo sapiens
DLPHS

SEQ ID NO: 11688 - protein, 5 aa, Homo sapiens
EMIDS

SEQ ID NO: 11689 - protein, 5 aa, Homo sapiens
GGLGP

SEQ ID NO: 11690 - protein, 5 aa, Homo sapiens
LHYEL

SEQ ID NO: 11691 - protein, 5 aa, Homo sapiens
DLQQV

SEQ ID NO: 11692 - protein, 5 aa, Homo sapiens
IGHSI

SEQ ID NO: 11693 - protein, 5 aa, Homo sapiens
RGERA

SEQ ID NO: 11694 - protein, 5 aa, Homo sapiens
SMLRK

SEQ ID NO: 11695 - protein, 5 aa, Homo sapiens
SLILL

SEQ ID NO: 11696 - protein, 5 aa, Homo sapiens
EPTSF

SEQ ID NO: 11697 - protein, 5 aa, Homo sapiens
RYRKH

SEQ ID NO: 11698 - protein, 5 aa, Homo sapiens
ASVKV

SEQ ID NO: 11699 - protein, 5 aa, Homo sapiens
LYTKN

SEQ ID NO: 11700 - protein, 5 aa, Homo sapiens
GYQTI

SEQ ID NO: 11701 - protein, 5 aa, Homo sapiens
KIKMK

SEQ ID NO: 11702 - protein, 5 aa, Homo sapiens
FRTEI

SEQ ID NO: 11703 - protein, 5 aa, Homo sapiens
SVKRN

SEQ ID NO: 11704 - protein, 5 aa, Homo sapiens
EGEEF

SEQ ID NO: 11705 - protein, 5 aa, Homo sapiens
LLVCQ

SEQ ID NO: 11706 - protein, 5 aa, Homo sapiens
DARAP

SEQ ID NO: 11707 - protein, 5 aa, Homo sapiens
STALK

SEQ ID NO: 11708 - protein, 5 aa, Homo sapiens
TKSSQ

SEQ ID NO: 11709 - protein, 5 aa, Homo sapiens
DRAAS

SEQ ID NO: 11710 - protein, 5 aa, Homo sapiens
LPTGQ

SEQ ID NO: 11711 - protein, 5 aa, Homo sapiens
LCDIK

SEQ ID NO: 11712 - protein, 5 aa, Homo sapiens
TDLKD

SEQ ID NO: 11713 - protein, 5 aa, Homo sapiens
YSALR

SEQ ID NO: 11714 - protein, 5 aa, Homo sapiens
YERVL

SEQ ID NO: 11715 - protein, 5 aa, Homo sapiens
RNQAV

SEQ ID NO: 11716 - protein, 5 aa, Homo sapiens
MSQRI

SEQ ID NO: 11717 - protein, 5 aa, Homo sapiens
VEFKR

SEQ ID NO: 11718 - protein, 5 aa, Homo sapiens
GSQSG

SEQ ID NO: 11719 - protein, 5 aa, Homo sapiens
INSNA

SEQ ID NO: 11720 - protein, 5 aa, Homo sapiens
SMTAL

SEQ ID NO: 11721 - protein, 5 aa, Homo sapiens
HMPDL

SEQ ID NO: 11722 - protein, 5 aa, Homo sapiens
GIHTG

SEQ ID NO: 11723 - protein, 5 aa, Homo sapiens
LPSAR

SEQ ID NO: 11724 - protein, 5 aa, Homo sapiens
FFPRK

SEQ ID NO: 11725 - protein, 5 aa, Homo sapiens
SGECG

SEQ ID NO: 11726 - protein, 5 aa, Homo sapiens
VCVRN

SEQ ID NO: 11727 - protein, 5 aa, Homo sapiens
AFFTS

SEQ ID NO: 11728 - protein, 5 aa, Homo sapiens
VAQMQ

SEQ ID NO: 11729 - protein, 5 aa, Homo sapiens
DLLRA

SEQ ID NO: 11730 - protein, 5 aa, Homo sapiens
QTLGK

SEQ ID NO: 11731 - protein, 5 aa, Homo sapiens
RVSAL

SEQ ID NO: 11732 - protein, 5 aa, Homo sapiens
QTLGG

SEQ ID NO: 11733 - protein, 5 aa, Homo sapiens
MCGDH

SEQ ID NO: 11734 - protein, 5 aa, Homo sapiens
CLRPR

SEQ ID NO: 11735 - protein, 5 aa, Homo sapiens
IWITD

SEQ ID NO: 11736 - protein, 5 aa, Homo sapiens
DPTIP

SEQ ID NO: 11737 - protein, 5 aa, Homo sapiens
MRTVI

SEQ ID NO: 11738 - protein, 5 aa, Homo sapiens
CCQNL

SEQ ID NO: 11739 - protein, 5 aa, Homo sapiens
VAQEH

SEQ ID NO: 11740 - protein, 5 aa, Homo sapiens
EWHYL

SEQ ID NO: 11741 - protein, 5 aa, Homo sapiens
AEKSA

SEQ ID NO: 11742 - protein, 5 aa, Homo sapiens
RVSIL

SEQ ID NO: 11743 - protein, 5 aa, Homo sapiens
ELPSP

SEQ ID NO: 11744 - protein, 5 aa, Homo sapiens
LDDWK

SEQ ID NO: 11745 - protein, 5 aa, Homo sapiens
HPYFG

SEQ ID NO: 11746 - protein, 5 aa, Homo sapiens
QRETL

SEQ ID NO: 11747 - protein, 5 aa, Homo sapiens
KPPCQ

SEQ ID NO: 11748 - protein, 5 aa, Homo sapiens
ANSKA

SEQ ID NO: 11749 - protein, 5 aa, Homo sapiens
LRIVL

SEQ ID NO: 11750 - protein, 5 aa, Homo sapiens
IVIED

SEQ ID NO: 11751 - protein, 5 aa, Homo sapiens
SGPWP

SEQ ID NO: 11752 - protein, 5 aa, Homo sapiens
DPCDS

SEQ ID NO: 11753 - protein, 5 aa, Homo sapiens
GDLCV

SEQ ID NO: 11754 - protein, 5 aa, Homo sapiens
SKEIH

SEQ ID NO: 11755 - protein, 5 aa, Homo sapiens
TRLHN

SEQ ID NO: 11756 - protein, 5 aa, Homo sapiens
EYPGN

SEQ ID NO: 11757 - protein, 5 aa, Homo sapiens
LAQTA

SEQ ID NO: 11758 - protein, 5 aa, Homo sapiens
GFDEH

SEQ ID NO: 11759 - protein, 5 aa, Homo sapiens
VYENL

SEQ ID NO: 11760 - protein, 5 aa, Homo sapiens
KMFCS

SEQ ID NO: 11761 - protein, 5 aa, Homo sapiens
LEIEQ

SEQ ID NO: 11762 - protein, 5 aa, Homo sapiens
RLSHS

SEQ ID NO: 11763 - protein, 5 aa, Homo sapiens
TGFWN

SEQ ID NO: 11764 - protein, 5 aa, Homo sapiens
DVEPN

SEQ ID NO: 11765 - protein, 5 aa, Homo sapiens
RKTHK

SEQ ID NO: 11766 - protein, 5 aa, Homo sapiens
RLLRN

SEQ ID NO: 11767 - protein, 5 aa, Homo sapiens
CFQLP

SEQ ID NO: 11768 - protein, 5 aa, Homo sapiens
LFSSP

SEQ ID NO: 11769 - protein, 5 aa, Homo sapiens
PCKKR

SEQ ID NO: 11770 - protein, 5 aa, Homo sapiens
PNTFV

SEQ ID NO: 11771 - protein, 5 aa, Homo sapiens
KKRKA

SEQ ID NO: 11772 - protein, 5 aa, Homo sapiens
GEANT

SEQ ID NO: 11773 - protein, 5 aa, Homo sapiens
RMKEI

SEQ ID NO: 11774 - protein, 5 aa, Homo sapiens
QRNSS

SEQ ID NO: 11775 - protein, 5 aa, Homo sapiens
SRTQT

SEQ ID NO: 11776 - protein, 5 aa, Homo sapiens
GKSQV

SEQ ID NO: 11777 - protein, 5 aa, Homo sapiens
PYKCE

SEQ ID NO: 11778 - protein, 5 aa, Homo sapiens
PAELL

SEQ ID NO: 11779 - protein, 5 aa, Homo sapiens
CMFFS

SEQ ID NO: 11780 - protein, 5 aa, Homo sapiens
AKSFI

SEQ ID NO: 11781 - protein, 5 aa, Homo sapiens
RSSLV

SEQ ID NO: 11782 - protein, 5 aa, Homo sapiens
IHTRV

SEQ ID NO: 11783 - protein, 5 aa, Homo sapiens
HDILT

SEQ ID NO: 11784 - protein, 5 aa, Homo sapiens
LPRPS

SEQ ID NO: 11785 - protein, 5 aa, Homo sapiens
CSRYW

SEQ ID NO: 11786 - protein, 5 aa, Homo sapiens
GLEEE

SEQ ID NO: 11787 - protein, 5 aa, Homo sapiens
HWQLA

SEQ ID NO: 11788 - protein, 5 aa, Homo sapiens
TVVLE

SEQ ID NO: 11789 - protein, 5 aa, Homo sapiens
VKTLD

SEQ ID NO: 11790 - protein, 5 aa, Homo sapiens
NLEVR

SEQ ID NO: 11791 - protein, 5 aa, Homo sapiens
FKIVL

SEQ ID NO: 11792 - protein, 5 aa, Homo sapiens
FSGCF

SEQ ID NO: 11793 - protein, 5 aa, Homo sapiens
PLPPS

SEQ ID NO: 11794 - protein, 5 aa, Homo sapiens
IDWED

SEQ ID NO: 11795 - protein, 5 aa, Homo sapiens
LVLSA

SEQ ID NO: 11796 - protein, 5 aa, Homo sapiens
KTPQL

SEQ ID NO: 11797 - protein, 5 aa, Homo sapiens
LMIPL

SEQ ID NO: 11798 - protein, 5 aa, Homo sapiens
ICVRS

SEQ ID NO: 11799 - protein, 5 aa, Homo sapiens
GRWII

SEQ ID NO: 11800 - protein, 5 aa, Homo sapiens
VAVKG

SEQ ID NO: 11801 - protein, 5 aa, Homo sapiens
RMSCS

SEQ ID NO: 11802 - protein, 5 aa, Homo sapiens
KSTQE

SEQ ID NO: 11803 - protein, 5 aa, Homo sapiens
IESKN

SEQ ID NO: 11804 - protein, 5 aa, Homo sapiens
EEEEG

SEQ ID NO: 11805 - protein, 5 aa, Homo sapiens
AFASK

SEQ ID NO: 11806 - protein, 5 aa, Homo sapiens
AWKTT

SEQ ID NO: 11807 - protein, 5 aa, Homo sapiens
EYFGS

SEQ ID NO: 11808 - protein, 5 aa, Homo sapiens
SVTTN

SEQ ID NO: 11809 - protein, 5 aa, Homo sapiens
SGGCC

SEQ ID NO: 11810 - protein, 5 aa, Homo sapiens
EIKKR

SEQ ID NO: 11811 - protein, 5 aa, Homo sapiens
PPPGR

SEQ ID NO: 11812 - protein, 5 aa, Homo sapiens
KSDQP

SEQ ID NO: 11813 - protein, 5 aa, Homo sapiens
GEKQV

SEQ ID NO: 11814 - protein, 5 aa, Homo sapiens
TGKRP

SEQ ID NO: 11815 - protein, 5 aa, Homo sapiens
ICDTK

SEQ ID NO: 11816 - protein, 5 aa, Homo sapiens
FGLTL

SEQ ID NO: 11817 - protein, 5 aa, Homo sapiens
YRNVE

SEQ ID NO: 11818 - protein, 5 aa, Homo sapiens
KEKKI

SEQ ID NO: 11819 - protein, 5 aa, Homo sapiens
DDILC

SEQ ID NO: 11820 - protein, 5 aa, Homo sapiens
AQGSE

SEQ ID NO: 11821 - protein, 5 aa, Homo sapiens
AAADQ

SEQ ID NO: 11822 - protein, 5 aa, Homo sapiens
NALPL

SEQ ID NO: 11823 - protein, 5 aa, Homo sapiens
QYELL

SEQ ID NO: 11824 - protein, 5 aa, Homo sapiens
CLGHY

SEQ ID NO: 11825 - protein, 5 aa, Homo sapiens
DHCGG

SEQ ID NO: 11826 - protein, 5 aa, Homo sapiens
MPHPH

SEQ ID NO: 11827 - protein, 5 aa, Homo sapiens
FSDGK

SEQ ID NO: 11828 - protein, 5 aa, Homo sapiens
NPFSP

SEQ ID NO: 11829 - protein, 5 aa, Homo sapiens
GGVSL

SEQ ID NO: 11830 - protein, 5 aa, Homo sapiens
AILTT

SEQ ID NO: 11831 - protein, 5 aa, Homo sapiens
PCRRT

SEQ ID NO: 11832 - protein, 5 aa, Homo sapiens
FDTSA

SEQ ID NO: 11833 - protein, 5 aa, Homo sapiens
PAAAS

SEQ ID NO: 11834 - protein, 5 aa, Homo sapiens
LQNAN

SEQ ID NO: 11835 - protein, 5 aa, Homo sapiens
LDVTL

SEQ ID NO: 11836 - protein, 5 aa, Homo sapiens
ATKMS

SEQ ID NO: 11837 - protein, 5 aa, Homo sapiens
EASAH

SEQ ID NO: 11838 - protein, 5 aa, Homo sapiens
FVNRK

SEQ ID NO: 11839 - protein, 5 aa, Homo sapiens
VAKLS

SEQ ID NO: 11840 - protein, 5 aa, Homo sapiens
SSISS

SEQ ID NO: 11841 - protein, 5 aa, Homo sapiens
IERLK

SEQ ID NO: 11842 - protein, 5 aa, Homo sapiens
LRNES

SEQ ID NO: 11843 - protein, 5 aa, Homo sapiens
GCLCK

SEQ ID NO: 11844 - protein, 5 aa, Homo sapiens
PLNVS

SEQ ID NO: 11845 - protein, 5 aa, Homo sapiens
PSQNS

SEQ ID NO: 11846 - protein, 5 aa, Homo sapiens
MKIWH

SEQ ID NO: 11847 - protein, 5 aa, Homo sapiens
TVEEN

SEQ ID NO: 11848 - protein, 5 aa, Homo sapiens
LVKTP

SEQ ID NO: 11849 - protein, 5 aa, Homo sapiens
TERRT

SEQ ID NO: 11850 - protein, 5 aa, Homo sapiens
THYQK

SEQ ID NO: 11851 - protein, 5 aa, Homo sapiens
WAPVP

SEQ ID NO: 11852 - protein, 5 aa, Homo sapiens
VTTES

SEQ ID NO: 11853 - protein, 5 aa, Homo sapiens
EESTM

SEQ ID NO: 11854 - protein, 5 aa, Homo sapiens
SGGCC

SEQ ID NO: 11855 - protein, 5 aa, Homo sapiens
ATAKA

SEQ ID NO: 11856 - protein, 5 aa, Homo sapiens
CVSLL

SEQ ID NO: 11857 - protein, 5 aa, Homo sapiens
RLRGS

SEQ ID NO: 11858 - protein, 5 aa, Homo sapiens
LKIEK

SEQ ID NO: 11859 - protein, 5 aa, Homo sapiens
RRRGG

SEQ ID NO: 11860 - protein, 5 aa, Homo sapiens
TTFVR

SEQ ID NO: 11861 - protein, 5 aa, Homo sapiens
ITFFT

SEQ ID NO: 11862 - protein, 5 aa, Homo sapiens
CTVLF

SEQ ID NO: 11863 - protein, 5 aa, Homo sapiens
QASES

SEQ ID NO: 11864 - protein, 5 aa, Homo sapiens
AKKVC

SEQ ID NO: 11865 - protein, 5 aa, Homo sapiens
HLCFL

SEQ ID NO: 11866 - protein, 5 aa, Homo sapiens
NAKDS

SEQ ID NO: 11867 - protein, 5 aa, Homo sapiens
SVILK

SEQ ID NO: 11868 - protein, 5 aa, Homo sapiens
KGKRD

SEQ ID NO: 11869 - protein, 5 aa, Homo sapiens
PSLGP

SEQ ID NO: 11870 - protein, 5 aa, Homo sapiens
KMGKS

SEQ ID NO: 11871 - protein, 5 aa, Homo sapiens
PKDRN

SEQ ID NO: 11872 - protein, 5 aa, Homo sapiens
YSSCY

SEQ ID NO: 11873 - protein, 5 aa, Homo sapiens
SMEIK

SEQ ID NO: 11874 - protein, 5 aa, Homo sapiens
YRRCF

SEQ ID NO: 11875 - protein, 5 aa, Homo sapiens
GKAKK

SEQ ID NO: 11876 - protein, 5 aa, Homo sapiens
ELSAG

SEQ ID NO: 11877 - protein, 5 aa, Homo sapiens
GPPPT

SEQ ID NO: 11878 - protein, 5 aa, Homo sapiens
QWRVI

SEQ ID NO: 11879 - protein, 5 aa, Homo sapiens
TEGYT

SEQ ID NO: 11880 - protein, 5 aa, Homo sapiens
TDGDC

SEQ ID NO: 11881 - protein, 5 aa, Homo sapiens
CRQRI

SEQ ID NO: 11882 - protein, 5 aa, Homo sapiens
GSIID

SEQ ID NO: 11883 - protein, 5 aa, Homo sapiens
EGFQF

SEQ ID NO: 11884 - protein, 5 aa, Homo sapiens
PAVVS

SEQ ID NO: 11885 - protein, 5 aa, Homo sapiens
YSQKD

SEQ ID NO: 11886 - protein, 5 aa, Homo sapiens
LLECS

SEQ ID NO: 11887 - protein, 5 aa, Homo sapiens
ATEGN

SEQ ID NO: 11888 - protein, 5 aa, Homo sapiens
SSVKF

SEQ ID NO: 11889 - protein, 5 aa, Homo sapiens
YSSCT

SEQ ID NO: 11890 - protein, 5 aa, Homo sapiens
HDGKH

SEQ ID NO: 11891 - protein, 5 aa, Homo sapiens
PGSHP

SEQ ID NO: 11892 - protein, 5 aa, Homo sapiens
FSEAC

SEQ ID NO: 11893 - protein, 5 aa, Homo sapiens
LHLCC

SEQ ID NO: 11894 - protein, 5 aa, Homo sapiens
KYACK

SEQ ID NO: 11895 - protein, 5 aa, Homo sapiens
DDHHK

SEQ ID NO: 11896 - protein, 5 aa, Homo sapiens
MLQSI

SEQ ID NO: 11897 - protein, 5 aa, Homo sapiens
GTERD

SEQ ID NO: 11898 - protein, 5 aa, Homo sapiens
QGSGK

SEQ ID NO: 11899 - protein, 5 aa, Homo sapiens
GRNIS

SEQ ID NO: 11900 - protein, 5 aa, Homo sapiens
FCAIL

SEQ ID NO: 11901 - protein, 5 aa, Homo sapiens
ISILK

SEQ ID NO: 11902 - protein, 5 aa, Homo sapiens
QVPFH

SEQ ID NO: 11903 - protein, 5 aa, Homo sapiens
DIITA

SEQ ID NO: 11904 - protein, 5 aa, Homo sapiens
LCCAS

SEQ ID NO: 11905 - protein, 5 aa, Homo sapiens
LGLML

SEQ ID NO: 11906 - protein, 5 aa, Homo sapiens
LERYL

SEQ ID NO: 11907 - protein, 5 aa, Homo sapiens
LFENN

SEQ ID NO: 11908 - protein, 5 aa, Homo sapiens
LQGRI

SEQ ID NO: 11909 - protein, 5 aa, Homo sapiens
FWTKN

SEQ ID NO: 11910 - protein, 5 aa, Homo sapiens
ISLLS

SEQ ID NO: 11911 - protein, 5 aa, Homo sapiens
FPSEL

SEQ ID NO: 11912 - protein, 5 aa, Homo sapiens
TVCFY

SEQ ID NO: 11913 - protein, 5 aa, Homo sapiens
GRRHR

SEQ ID NO: 11914 - protein, 5 aa, Homo sapiens
KTEAV

SEQ ID NO: 11915 - protein, 5 aa, Homo sapiens
CVLCR

SEQ ID NO: 11916 - protein, 5 aa, Homo sapiens
SHHIP

SEQ ID NO: 11917 - protein, 5 aa, Homo sapiens
DFSSW

SEQ ID NO: 11918 - protein, 5 aa, Homo sapiens
SGYYY

SEQ ID NO: 11919 - protein, 5 aa, Homo sapiens
KYLQK

SEQ ID NO: 11920 - protein, 5 aa, Homo sapiens
TMKRQ

SEQ ID NO: 11921 - protein, 5 aa, Homo sapiens
LLSLS

SEQ ID NO: 11922 - protein, 5 aa, Homo sapiens
RAPGG

SEQ ID NO: 11923 - protein, 5 aa, Homo sapiens
KMTQH

SEQ ID NO: 11924 - protein, 5 aa, Homo sapiens
CAERR

SEQ ID NO: 11925 - protein, 5 aa, Homo sapiens
SKTGI

SEQ ID NO: 11926 - protein, 5 aa, Homo sapiens
KARPE

SEQ ID NO: 11927 - protein, 5 aa, Homo sapiens
DKQMS

SEQ ID NO: 11928 - protein, 5 aa, Homo sapiens
LSIKM

SEQ ID NO: 11929 - protein, 5 aa, Homo sapiens
LPSGC

SEQ ID NO: 11930 - protein, 5 aa, Homo sapiens
PSESV

SEQ ID NO: 11931 - protein, 5 aa, Homo sapiens
SGGCC

SEQ ID NO: 11932 - protein, 5 aa, Homo sapiens
HLVKK

SEQ ID NO: 11933 - protein, 5 aa, Homo sapiens
FAKLD

SEQ ID NO: 11934 - protein, 5 aa, Homo sapiens
PTQKQ

SEQ ID NO: 11935 - protein, 5 aa, Homo sapiens
NLCPH

SEQ ID NO: 11936 - protein, 5 aa, Homo sapiens
ALWEY

SEQ ID NO: 11937 - protein, 5 aa, Homo sapiens
GSMRN

SEQ ID NO: 11938 - protein, 5 aa, Homo sapiens
QLNNN

SEQ ID NO: 11939 - protein, 5 aa, Homo sapiens
NRKKH

SEQ ID NO: 11940 - protein, 5 aa, Homo sapiens
RHQVY

SEQ ID NO: 11941 - protein, 5 aa, Homo sapiens
EKSFD

SEQ ID NO: 11942 - protein, 5 aa, Homo sapiens
SSGFY

SEQ ID NO: 11943 - protein, 5 aa, Homo sapiens
SIAMI

SEQ ID NO: 11944 - protein, 5 aa, Homo sapiens
SSNII

SEQ ID NO: 11945 - protein, 5 aa, Homo sapiens
IEPST

SEQ ID NO: 11946 - protein, 5 aa, Homo sapiens
NIEMQ

SEQ ID NO: 11947 - protein, 5 aa, Homo sapiens
RDVQD

SEQ ID NO: 11948 - protein, 5 aa, Homo sapiens
FHRPA

SEQ ID NO: 11949 - protein, 5 aa, Homo sapiens
WETMT

SEQ ID NO: 11950 - protein, 5 aa, Homo sapiens
TVCFY

SEQ ID NO: 11951 - protein, 5 aa, Homo sapiens
RLVKD

SEQ ID NO: 11952 - protein, 5 aa, Homo sapiens
SLITT

SEQ ID NO: 11953 - protein, 5 aa, Homo sapiens
HTEKS

SEQ ID NO: 11954 - protein, 5 aa, Homo sapiens
QPHLL

SEQ ID NO: 11955 - protein, 5 aa, Homo sapiens
MLILN

SEQ ID NO: 11956 - protein, 5 aa, Homo sapiens
LCHKM

SEQ ID NO: 11957 - protein, 5 aa, Homo sapiens
PSKAP

SEQ ID NO: 11958 - protein, 5 aa, Homo sapiens
EPLVQ

SEQ ID NO: 11959 - protein, 5 aa, Homo sapiens
KKRKA

SEQ ID NO: 11960 - protein, 5 aa, Homo sapiens
QRTIQ

SEQ ID NO: 11961 - protein, 5 aa, Homo sapiens
YERIL

SEQ ID NO: 11962 - protein, 5 aa, Homo sapiens
PWQAL

SEQ ID NO: 11963 - protein, 5 aa, Homo sapiens
NLPDI

SEQ ID NO: 11964 - protein, 5 aa, Homo sapiens
VCTVV

SEQ ID NO: 11965 - protein, 5 aa, Homo sapiens
YQFTC

SEQ ID NO: 11966 - protein, 5 aa, Homo sapiens
FPSKQ

SEQ ID NO: 11967 - protein, 5 aa, Homo sapiens
LKVQV

SEQ ID NO: 11968 - protein, 5 aa, Homo sapiens
REDTL

SEQ ID NO: 11969 - protein, 5 aa, Homo sapiens
EKSCD

SEQ ID NO: 11970 - protein, 5 aa, Homo sapiens
SETKL

SEQ ID NO: 11971 - protein, 5 aa, Homo sapiens
CLISS

SEQ ID NO: 11972 - protein, 5 aa, Homo sapiens
MVLPL

SEQ ID NO: 11973 - protein, 5 aa, Homo sapiens
RRPRL

SEQ ID NO: 11974 - protein, 5 aa, Homo sapiens
QATCY

SEQ ID NO: 11975 - protein, 5 aa, Homo sapiens
GYQLV

SEQ ID NO: 11976 - protein, 5 aa, Homo sapiens
SGGCC

SEQ ID NO: 11977 - protein, 5 aa, Homo sapiens
WMGGQ

SEQ ID NO: 11978 - protein, 5 aa, Homo sapiens
LDNDG

SEQ ID NO: 11979 - protein, 5 aa, Homo sapiens
EEYSD

SEQ ID NO: 11980 - protein, 5 aa, Homo sapiens
FQACL

SEQ ID NO: 11981 - protein, 5 aa, Homo sapiens
IMLIS

SEQ ID NO: 11982 - protein, 5 aa, Homo sapiens
RGRPA

SEQ ID NO: 11983 - protein, 5 aa, Homo sapiens
LGLGS

SEQ ID NO: 11984 - protein, 5 aa, Homo sapiens
SLDAE

SEQ ID NO: 11985 - protein, 5 aa, Homo sapiens
RAKLS

SEQ ID NO: 11986 - protein, 5 aa, Homo sapiens
ATHSN

SEQ ID NO: 11987 - protein, 5 aa, Homo sapiens
GLESR

SEQ ID NO: 11988 - protein, 5 aa, Homo sapiens
HETTV

SEQ ID NO: 11989 - protein, 5 aa, Homo sapiens
GGPNP

SEQ ID NO: 11990 - protein, 5 aa, Homo sapiens
LPTSM

SEQ ID NO: 11991 - protein, 5 aa, Homo sapiens
IETTV

SEQ ID NO: 11992 - protein, 5 aa, Homo sapiens
FSGFY

SEQ ID NO: 11993 - protein, 5 aa, Homo sapiens
VKAYK

SEQ ID NO: 11994 - protein, 5 aa, Homo sapiens
PLIYS

SEQ ID NO: 11995 - protein, 5 aa, Homo sapiens
PSLEA

SEQ ID NO: 11996 - protein, 5 aa, Homo sapiens
ILQRI

SEQ ID NO: 11997 - protein, 5 aa, Homo sapiens
CRCCA

SEQ ID NO: 11998 - protein, 5 aa, Homo sapiens
FSGFY

SEQ ID NO: 11999 - protein, 5 aa, Homo sapiens
ETPLL

SEQ ID NO: 12000 - protein, 5 aa, Homo sapiens
SAGCC

SEQ ID NO: 12001 - protein, 5 aa, Homo sapiens
RKLLP

SEQ ID NO: 12002 - protein, 5 aa, Homo sapiens
QKSSV

SEQ ID NO: 12003 - protein, 5 aa, Homo sapiens
NPVAG

SEQ ID NO: 12004 - protein, 5 aa, Homo sapiens
LLLGH

SEQ ID NO: 12005 - protein, 5 aa, Homo sapiens
PTPRQ

SEQ ID NO: 12006 - protein, 5 aa, Homo sapiens
PISSW

SEQ ID NO: 12007 - protein, 5 aa, Homo sapiens
PYRCE

SEQ ID NO: 12008 - protein, 5 aa, Homo sapiens
SEMLQ

SEQ ID NO: 12009 - protein, 5 aa, Homo sapiens
NDWSD

SEQ ID NO: 12010 - protein, 5 aa, Homo sapiens
RSQEA

SEQ ID NO: 12011 - protein, 5 aa, Homo sapiens
CSWPL

SEQ ID NO: 12012 - protein, 5 aa, Homo sapiens
PSFFI

SEQ ID NO: 12013 - protein, 5 aa, Homo sapiens
APADK

SEQ ID NO: 12014 - protein, 5 aa, Homo sapiens
PSRHF

SEQ ID NO: 12015 - protein, 5 aa, Homo sapiens
NLHLQ

SEQ ID NO: 12016 - protein, 5 aa, Homo sapiens
NSDMH

SEQ ID NO: 12017 - protein, 5 aa, Homo sapiens
SKGKH

SEQ ID NO: 12018 - protein, 5 aa, Homo sapiens
ETTSN

SEQ ID NO: 12019 - protein, 5 aa, Homo sapiens
GLRHL

SEQ ID NO: 12020 - protein, 5 aa, Homo sapiens
CIEEI

SEQ ID NO: 12021 - protein, 5 aa, Homo sapiens
EFGSC

SEQ ID NO: 12022 - protein, 5 aa, Homo sapiens
NPTRK

SEQ ID NO: 12023 - protein, 5 aa, Homo sapiens
GKRKC

SEQ ID NO: 12024 - protein, 5 aa, Homo sapiens
MEEVD

SEQ ID NO: 12025 - protein, 5 aa, Homo sapiens
LKAPA

SEQ ID NO: 12026 - protein, 5 aa, Homo sapiens
SSVSE

SEQ ID NO: 12027 - protein, 5 aa, Homo sapiens
KSKTQ

SEQ ID NO: 12028 - protein, 5 aa, Homo sapiens
HCTMC

SEQ ID NO: 12029 - protein, 5 aa, Homo sapiens
NPADT

SEQ ID NO: 12030 - protein, 5 aa, Homo sapiens
TTLNQ

SEQ ID NO: 12031 - protein, 5 aa, Homo sapiens
QVKKK

SEQ ID NO: 12032 - protein, 5 aa, Homo sapiens
SFQKQ

SEQ ID NO: 12033 - protein, 5 aa, Homo sapiens
LKHDD

SEQ ID NO: 12034 - protein, 5 aa, Homo sapiens
PAVHL

SEQ ID NO: 12035 - protein, 5 aa, Homo sapiens
GGGCC

SEQ ID NO: 12036 - protein, 5 aa, Homo sapiens
GLRTH

SEQ ID NO: 12037 - protein, 5 aa, Homo sapiens
PGDWH

SEQ ID NO: 12038 - protein, 5 aa, Homo sapiens
AGNIS

SEQ ID NO: 12039 - protein, 5 aa, Homo sapiens
LGISH

SEQ ID NO: 12040 - protein, 5 aa, Homo sapiens
DTSLT

SEQ ID NO: 12041 - protein, 5 aa, Homo sapiens
NPYFK

SEQ ID NO: 12042 - protein, 5 aa, Homo sapiens
VMRLG

SEQ ID NO: 12043 - protein, 5 aa, Homo sapiens
LGLQA

SEQ ID NO: 12044 - protein, 5 aa, Homo sapiens
LDELP

SEQ ID NO: 12045 - protein, 5 aa, Homo sapiens
KKQQI

SEQ ID NO: 12046 - protein, 5 aa, Homo sapiens
RGGGT

SEQ ID NO: 12047 - protein, 5 aa, Homo sapiens
CRQRI

SEQ ID NO: 12048 - protein, 5 aa, Homo sapiens
IIYPD

SEQ ID NO: 12049 - protein, 5 aa, Homo sapiens
PETES

SEQ ID NO: 12050 - protein, 5 aa, Homo sapiens
LLLDL

SEQ ID NO: 12051 - protein, 5 aa, Homo sapiens
SLQWE

SEQ ID NO: 12052 - protein, 5 aa, Homo sapiens
GSIID

SEQ ID NO: 12053 - protein, 5 aa, Homo sapiens
PSCVT

SEQ ID NO: 12054 - protein, 5 aa, Homo sapiens
ANLPF

SEQ ID NO: 12055 - protein, 5 aa, Homo sapiens
LDYIL

SEQ ID NO: 12056 - protein, 5 aa, Homo sapiens
NNRLK

SEQ ID NO: 12057 - protein, 5 aa, Homo sapiens
LLATT

SEQ ID NO: 12058 - protein, 5 aa, Homo sapiens
GESDT

SEQ ID NO: 12059 - protein, 5 aa, Homo sapiens
NSKGA

SEQ ID NO: 12060 - protein, 5 aa, Homo sapiens
NELKL

SEQ ID NO: 12061 - protein, 5 aa, Homo sapiens
RSVSR

SEQ ID NO: 12062 - protein, 5 aa, Homo sapiens
SGGCC

SEQ ID NO: 12063 - protein, 5 aa, Homo sapiens
TGKGS

SEQ ID NO: 12064 - protein, 5 aa, Homo sapiens
SIAAA

SEQ ID NO: 12065 - protein, 5 aa, Homo sapiens
YLTGY

SEQ ID NO: 12066 - protein, 5 aa, Homo sapiens
TIFTV

SEQ ID NO: 12067 - protein, 5 aa, Homo sapiens
QQYED

SEQ ID NO: 12068 - protein, 5 aa, Homo sapiens
WIQHR

SEQ ID NO: 12069 - protein, 5 aa, Homo sapiens
IHTHL

SEQ ID NO: 12070 - protein, 5 aa, Homo sapiens
VPHHL

SEQ ID NO: 12071 - protein, 5 aa, Homo sapiens
HDVIS

SEQ ID NO: 12072 - protein, 5 aa, Homo sapiens
QSRWR

SEQ ID NO: 12073 - protein, 5 aa, Homo sapiens
LERFH

SEQ ID NO: 12074 - protein, 5 aa, Homo sapiens
IYKMN

SEQ ID NO: 12075 - protein, 5 aa, Homo sapiens
GGTVV

SEQ ID NO: 12076 - protein, 5 aa, Homo sapiens
HTINR

SEQ ID NO: 12077 - protein, 5 aa, Homo sapiens
PEDVD

SEQ ID NO: 12078 - protein, 5 aa, Homo sapiens
KGAHL

SEQ ID NO: 12079 - protein, 5 aa, Homo sapiens
CHFYH

SEQ ID NO: 12080 - protein, 5 aa, Homo sapiens
RDERG

SEQ ID NO: 12081 - protein, 5 aa, Homo sapiens
GQRCS

SEQ ID NO: 12082 - protein, 5 aa, Homo sapiens
PSHGT

SEQ ID NO: 12083 - protein, 5 aa, Homo sapiens
SGCHF

SEQ ID NO: 12084 - protein, 5 aa, Homo sapiens
RNLTA

SEQ ID NO: 12085 - protein, 5 aa, Homo sapiens
PAELK

SEQ ID NO: 12086 - protein, 5 aa, Homo sapiens
SYGFY

SEQ ID NO: 12087 - protein, 5 aa, Homo sapiens
CLWNT

SEQ ID NO: 12088 - protein, 5 aa, Homo sapiens
SSISS

SEQ ID NO: 12089 - protein, 5 aa, Homo sapiens
ARETS

SEQ ID NO: 12090 - protein, 5 aa, Homo sapiens
SKIHS

SEQ ID NO: 12091 - protein, 5 aa, Homo sapiens
IGILA

SEQ ID NO: 12092 - protein, 5 aa, Homo sapiens
TVCFY

SEQ ID NO: 12093 - protein, 5 aa, Homo sapiens
GQKKW

SEQ ID NO: 12094 - protein, 5 aa, Homo sapiens
RDVAP

SEQ ID NO: 12095 - protein, 5 aa, Homo sapiens
TLGPG

SEQ ID NO: 12096 - protein, 5 aa, Homo sapiens
FLLNK

SEQ ID NO: 12097 - protein, 5 aa, Homo sapiens
YERGH

SEQ ID NO: 12098 - protein, 5 aa, Homo sapiens
SRLAC

SEQ ID NO: 12099 - protein, 5 aa, Homo sapiens
CYSSC

SEQ ID NO: 12100 - protein, 5 aa, Homo sapiens
NLTKY

SEQ ID NO: 12101 - protein, 5 aa, Homo sapiens
YGSPW

SEQ ID NO: 12102 - protein, 5 aa, Homo sapiens
TFFSW

SEQ ID NO: 12103 - protein, 5 aa, Homo sapiens
DLGFL

SEQ ID NO: 12104 - protein, 5 aa, Homo sapiens
HFLYW

SEQ ID NO: 12105 - protein, 5 aa, Homo sapiens
ALEHF

SEQ ID NO: 12106 - protein, 5 aa, Homo sapiens
AASPK

SEQ ID NO: 12107 - protein, 5 aa, Homo sapiens
ILVRS

SEQ ID NO: 12108 - protein, 5 aa, Homo sapiens
KNVMM

SEQ ID NO: 12109 - protein, 5 aa, Homo sapiens
LNLSI

SEQ ID NO: 12110 - protein, 5 aa, Homo sapiens
TDAAV

SEQ ID NO: 12111 - protein, 5 aa, Homo sapiens
LDSGH

SEQ ID NO: 12112 - protein, 5 aa, Homo sapiens
PARTH

SEQ ID NO: 12113 - protein, 5 aa, Homo sapiens
RTYSC

SEQ ID NO: 12114 - protein, 5 aa, Homo sapiens
KKSAL

SEQ ID NO: 12115 - protein, 5 aa, Homo sapiens
RPKSE

SEQ ID NO: 12116 - protein, 5 aa, Homo sapiens
KIFRF

SEQ ID NO: 12117 - protein, 5 aa, Homo sapiens
AATQV

SEQ ID NO: 12118 - protein, 5 aa, Homo sapiens
TGSEE

SEQ ID NO: 12119 - protein, 5 aa, Homo sapiens
HPMQS

SEQ ID NO: 12120 - protein, 5 aa, Homo sapiens
IRFLH

SEQ ID NO: 12121 - protein, 5 aa, Homo sapiens
PEDIE

SEQ ID NO: 12122 - protein, 5 aa, Homo sapiens
LEKWT

SEQ ID NO: 12123 - protein, 5 aa, Homo sapiens
QEPTP

SEQ ID NO: 12124 - protein, 5 aa, Homo sapiens
SLSVS

SEQ ID NO: 12125 - protein, 5 aa, Homo sapiens
HVTFY

SEQ ID NO: 12126 - protein, 5 aa, Homo sapiens
APGPH

SEQ ID NO: 12127 - protein, 5 aa, Homo sapiens
YEYPS

SEQ ID NO: 12128 - protein, 5 aa, Homo sapiens
FTGFY

SEQ ID NO: 12129 - protein, 5 aa, Homo sapiens
TIHMG

SEQ ID NO: 12130 - protein, 5 aa, Homo sapiens
APLAE

SEQ ID NO: 12131 - protein, 5 aa, Homo sapiens
KGVQN

SEQ ID NO: 12132 - protein, 5 aa, Homo sapiens
FLEAP

SEQ ID NO: 12133 - protein, 5 aa, Homo sapiens
ILDAL

SEQ ID NO: 12134 - protein, 5 aa, Homo sapiens
IPRVL

SEQ ID NO: 12135 - protein, 5 aa, Homo sapiens
YTSSK

SEQ ID NO: 12136 - protein, 5 aa, Homo sapiens
CLSDA

SEQ ID NO: 12137 - protein, 5 aa, Homo sapiens
FTALK

SEQ ID NO: 12138 - protein, 5 aa, Homo sapiens
GITGS

SEQ ID NO: 12139 - protein, 5 aa, Homo sapiens
QILLM

SEQ ID NO: 12140 - protein, 5 aa, Homo sapiens
AKSES

SEQ ID NO: 12141 - protein, 5 aa, Homo sapiens
RPEVP

SEQ ID NO: 12142 - protein, 5 aa, Homo sapiens
LTGYV

SEQ ID NO: 12143 - protein, 5 aa, Homo sapiens
THSSK

SEQ ID NO: 12144 - protein, 5 aa, Homo sapiens
QATGT

SEQ ID NO: 12145 - protein, 5 aa, Homo sapiens
SELDQ

SEQ ID NO: 12146 - protein, 5 aa, Homo sapiens
VWKPD

SEQ ID NO: 12147 - protein, 5 aa, Homo sapiens
ALNKI

SEQ ID NO: 12148 - protein, 5 aa, Homo sapiens
DDWEF

SEQ ID NO: 12149 - protein, 5 aa, Homo sapiens
MAFFP

SEQ ID NO: 12150 - protein, 5 aa, Homo sapiens
EMGLA

SEQ ID NO: 12151 - protein, 5 aa, Homo sapiens
LQPQQ

SEQ ID NO: 12152 - protein, 5 aa, Homo sapiens
EDEAQ

SEQ ID NO: 12153 - protein, 5 aa, Homo sapiens
SKQWS

SEQ ID NO: 12154 - protein, 5 aa, Homo sapiens
PEEEL

SEQ ID NO: 12155 - protein, 5 aa, Homo sapiens
KAMAK

SEQ ID NO: 12156 - protein, 5 aa, Homo sapiens
AFYGV

SEQ ID NO: 12157 - protein, 5 aa, Homo sapiens
KKSIK

SEQ ID NO: 12158 - protein, 5 aa, Homo sapiens
NHYKK

SEQ ID NO: 12159 - protein, 5 aa, Homo sapiens
DWWGN

SEQ ID NO: 12160 - protein, 5 aa, Homo sapiens
SNAVQ

SEQ ID NO: 12161 - protein, 5 aa, Homo sapiens
LLPHT

SEQ ID NO: 12162 - protein, 5 aa, Homo sapiens
SWRTE

SEQ ID NO: 12163 - protein, 5 aa, Homo sapiens
PEVPD

SEQ ID NO: 12164 - protein, 5 aa, Homo sapiens
EYSQY

SEQ ID NO: 12165 - protein, 5 aa, Homo sapiens
VTEKE

SEQ ID NO: 12166 - protein, 5 aa, Homo sapiens
RMRKI

SEQ ID NO: 12167 - protein, 5 aa, Homo sapiens
ATPAE

SEQ ID NO: 12168 - protein, 5 aa, Homo sapiens
AENIV

SEQ ID NO: 12169 - protein, 5 aa, Homo sapiens
IFRRP

SEQ ID NO: 12170 - protein, 5 aa, Homo sapiens
VPRPA

SEQ ID NO: 12171 - protein, 5 aa, Homo sapiens
DGHWF

SEQ ID NO: 12172 - protein, 5 aa, Homo sapiens
VCVRN

SEQ ID NO: 12173 - protein, 5 aa, Homo sapiens
KKRVP

SEQ ID NO: 12174 - protein, 5 aa, Homo sapiens
EGEEY

SEQ ID NO: 12175 - protein, 5 aa, Homo sapiens
KHLPA

SEQ ID NO: 12176 - protein, 5 aa, Homo sapiens
LQLHF

SEQ ID NO: 12177 - protein, 5 aa, Homo sapiens
EEKIL

SEQ ID NO: 12178 - protein, 5 aa, Homo sapiens
PEDDL

SEQ ID NO: 12179 - protein, 5 aa, Homo sapiens
LNRIK

SEQ ID NO: 12180 - protein, 5 aa, Homo sapiens
PFHGT

SEQ ID NO: 12181 - protein, 5 aa, Homo sapiens
AAFVW

SEQ ID NO: 12182 - protein, 5 aa, Homo sapiens
KEIVA

SEQ ID NO: 12183 - protein, 5 aa, Homo sapiens
NRLDR

SEQ ID NO: 12184 - protein, 5 aa, Homo sapiens
SKPKK

SEQ ID NO: 12185 - protein, 5 aa, Homo sapiens
CIRHR

SEQ ID NO: 12186 - protein, 5 aa, Homo sapiens
LKVPA

SEQ ID NO: 12187 - protein, 5 aa, Homo sapiens
EEGLG

SEQ ID NO: 12188 - protein, 5 aa, Homo sapiens
DLSPH

SEQ ID NO: 12189 - protein, 5 aa, Homo sapiens
KAAES

SEQ ID NO: 12190 - protein, 5 aa, Homo sapiens
PEDSR

SEQ ID NO: 12191 - protein, 5 aa, Homo sapiens
GAAAP

SEQ ID NO: 12192 - protein, 5 aa, Homo sapiens
YVKLL

SEQ ID NO: 12193 - protein, 5 aa, Homo sapiens
LKVQT

SEQ ID NO: 12194 - protein, 5 aa, Homo sapiens
RADIL

SEQ ID NO: 12195 - protein, 5 aa, Homo sapiens
PTEAS

SEQ ID NO: 12196 - protein, 5 aa, Homo sapiens
IPNRK

SEQ ID NO: 12197 - protein, 5 aa, Homo sapiens
ICKIV

SEQ ID NO: 12198 - protein, 5 aa, Homo sapiens
AEAAS

SEQ ID NO: 12199 - protein, 5 aa, Homo sapiens
WLCIQ

SEQ ID NO: 12200 - protein, 5 aa, Homo sapiens
FVINK

SEQ ID NO: 12201 - protein, 5 aa, Homo sapiens
SPTSQ

SEQ ID NO: 12202 - protein, 5 aa, Homo sapiens
SHLFL

SEQ ID NO: 12203 - protein, 5 aa, Homo sapiens
LLLYT

SEQ ID NO: 12204 - protein, 5 aa, Homo sapiens
YSGTP

SEQ ID NO: 12205 - protein, 5 aa, Homo sapiens
KPPNE

SEQ ID NO: 12206 - protein, 5 aa, Homo sapiens
QQPPQ

SEQ ID NO: 12207 - protein, 5 aa, Homo sapiens
MVAPL

SEQ ID NO: 12208 - protein, 5 aa, Homo sapiens
RVYEE

SEQ ID NO: 12209 - protein, 5 aa, Homo sapiens
QRKGL

SEQ ID NO: 12210 - protein, 5 aa, Homo sapiens
QGHQP

SEQ ID NO: 12211 - protein, 5 aa, Homo sapiens
RFRKS

SEQ ID NO: 12212 - protein, 5 aa, Homo sapiens
IEEDP

SEQ ID NO: 12213 - protein, 5 aa, Homo sapiens
MACKK

SEQ ID NO: 12214 - protein, 5 aa, Homo sapiens
QEGAP

SEQ ID NO: 12215 - protein, 5 aa, Homo sapiens
NPTKS

SEQ ID NO: 12216 - protein, 5 aa, Homo sapiens
GPHSS

SEQ ID NO: 12217 - protein, 5 aa, Homo sapiens
GLKLT

SEQ ID NO: 12218 - protein, 5 aa, Homo sapiens
IEHLF

SEQ ID NO: 12219 - protein, 5 aa, Homo sapiens
LQRTS

SEQ ID NO: 12220 - protein, 5 aa, Homo sapiens
FIYYE

SEQ ID NO: 12221 - protein, 5 aa, Homo sapiens
IRLRK

SEQ ID NO: 12222 - protein, 5 aa, Homo sapiens
KVSCP

SEQ ID NO: 12223 - protein, 5 aa, Homo sapiens
VFVKV

SEQ ID NO: 12224 - protein, 5 aa, Homo sapiens
LWMAG

SEQ ID NO: 12225 - protein, 5 aa, Homo sapiens
ILVET

SEQ ID NO: 12226 - protein, 5 aa, Homo sapiens
KMPAK

SEQ ID NO: 12227 - protein, 5 aa, Homo sapiens
DYRSI

SEQ ID NO: 12228 - protein, 5 aa, Homo sapiens
TKPSP

SEQ ID NO: 12229 - protein, 5 aa, Homo sapiens
QKYAM

SEQ ID NO: 12230 - protein, 5 aa, Homo sapiens
GAAKH

SEQ ID NO: 12231 - protein, 5 aa, Homo sapiens
YEDVT

SEQ ID NO: 12232 - protein, 5 aa, Homo sapiens
DGEDG

SEQ ID NO: 12233 - protein, 5 aa, Homo sapiens
KLDAS

SEQ ID NO: 12234 - protein, 5 aa, Homo sapiens
KKASE

SEQ ID NO: 12235 - protein, 5 aa, Homo sapiens
KISVI

SEQ ID NO: 12236 - protein, 5 aa, Homo sapiens
GVGKK

SEQ ID NO: 12237 - protein, 5 aa, Homo sapiens
KAVPS

SEQ ID NO: 12238 - protein, 5 aa, Homo sapiens
PGKPS

SEQ ID NO: 12239 - protein, 5 aa, Homo sapiens
MWVPS

SEQ ID NO: 12240 - protein, 5 aa, Homo sapiens
GWALE

SEQ ID NO: 12241 - protein, 5 aa, Homo sapiens
GGSRL

SEQ ID NO: 12242 - protein, 5 aa, Homo sapiens
FEPSW

SEQ ID NO: 12243 - protein, 5 aa, Homo sapiens
SISDD

SEQ ID NO: 12244 - protein, 5 aa, Homo sapiens
EKPHH

SEQ ID NO: 12245 - protein, 5 aa, Homo sapiens
KVKRI

SEQ ID NO: 12246 - protein, 5 aa, Homo sapiens
IHHVQ

SEQ ID NO: 12247 - protein, 5 aa, Homo sapiens
LMTTV

SEQ ID NO: 12248 - protein, 5 aa, Homo sapiens
KPEPI

SEQ ID NO: 12249 - protein, 5 aa, Homo sapiens
KVRAQ

SEQ ID NO: 12250 - protein, 5 aa, Homo sapiens
LGARA

SEQ ID NO: 12251 - protein, 5 aa, Homo sapiens
PVTSG

SEQ ID NO: 12252 - protein, 5 aa, Homo sapiens
GPVPV

SEQ ID NO: 12253 - protein, 5 aa, Homo sapiens
NMKTD

SEQ ID NO: 12254 - protein, 5 aa, Homo sapiens
TGPEG

SEQ ID NO: 12255 - protein, 5 aa, Homo sapiens
EVFSS

SEQ ID NO: 12256 - protein, 5 aa, Homo sapiens
WIPVL

SEQ ID NO: 12257 - protein, 5 aa, Homo sapiens
PGGGG

SEQ ID NO: 12258 - protein, 5 aa, Homo sapiens
CMSIL

SEQ ID NO: 12259 - protein, 5 aa, Homo sapiens
RKKQE

SEQ ID NO: 12260 - protein, 5 aa, Homo sapiens
STQEW

SEQ ID NO: 12261 - protein, 5 aa, Homo sapiens
SAVVK

SEQ ID NO: 12262 - protein, 5 aa, Homo sapiens
EIRHS

SEQ ID NO: 12263 - protein, 5 aa, Homo sapiens
RIDFG

SEQ ID NO: 12264 - protein, 5 aa, Homo sapiens
QEPGQ

SEQ ID NO: 12265 - protein, 5 aa, Homo sapiens
GRYVS

SEQ ID NO: 12266 - protein, 5 aa, Homo sapiens
LQLQN

SEQ ID NO: 12267 - protein, 5 aa, Homo sapiens
FQQAS

SEQ ID NO: 12268 - protein, 5 aa, Homo sapiens
KHKRK

SEQ ID NO: 12269 - protein, 5 aa, Homo sapiens
AFGGQ

SEQ ID NO: 12270 - protein, 5 aa, Homo sapiens
PTRRN

SEQ ID NO: 12271 - protein, 5 aa, Homo sapiens
PYFED

SEQ ID NO: 12272 - protein, 5 aa, Homo sapiens
EKVYH

SEQ ID NO: 12273 - protein, 5 aa, Homo sapiens
ARRRL

SEQ ID NO: 12274 - protein, 5 aa, Homo sapiens
PSAIA

SEQ ID NO: 12275 - protein, 5 aa, Homo sapiens
PQSEV

SEQ ID NO: 12276 - protein, 5 aa, Homo sapiens
AALPY

SEQ ID NO: 12277 - protein, 5 aa, Homo sapiens
NLTAF

SEQ ID NO: 12278 - protein, 5 aa, Homo sapiens
NWELN

SEQ ID NO: 12279 - protein, 5 aa, Homo sapiens
RFGIA

SEQ ID NO: 12280 - protein, 5 aa, Homo sapiens
GIIPT

SEQ ID NO: 12281 - protein, 5 aa, Homo sapiens
ISTPV

SEQ ID NO: 12282 - protein, 5 aa, Homo sapiens
HFAML

SEQ ID NO: 12283 - protein, 5 aa, Homo sapiens
PWLNS

SEQ ID NO: 12284 - protein, 5 aa, Homo sapiens
SHEKS

SEQ ID NO: 12285 - protein, 5 aa, Homo sapiens
GALGL

SEQ ID NO: 12286 - protein, 5 aa, Homo sapiens
QTVKT

SEQ ID NO: 12287 - protein, 5 aa, Homo sapiens
SEKTS

SEQ ID NO: 12288 - protein, 5 aa, Homo sapiens
PEWDL

SEQ ID NO: 12289 - protein, 5 aa, Homo sapiens
GLTPS

SEQ ID NO: 12290 - protein, 5 aa, Homo sapiens
IQANS

SEQ ID NO: 12291 - protein, 5 aa, Homo sapiens
YYTSL

SEQ ID NO: 12292 - protein, 5 aa, Homo sapiens
IANFF

SEQ ID NO: 12293 - protein, 5 aa, Homo sapiens
TPSPK

SEQ ID NO: 12294 - protein, 5 aa, Homo sapiens
GACGC

SEQ ID NO: 12295 - protein, 5 aa, Homo sapiens
EPAQA

SEQ ID NO: 12296 - protein, 5 aa, Homo sapiens
KVSPH

SEQ ID NO: 12297 - protein, 5 aa, Homo sapiens
GVASR

SEQ ID NO: 12298 - protein, 5 aa, Homo sapiens
SKRKR

SEQ ID NO: 12299 - protein, 5 aa, Homo sapiens
SDGQC

SEQ ID NO: 12300 - protein, 5 aa, Homo sapiens
KRKAE

SEQ ID NO: 12301 - protein, 5 aa, Homo sapiens
RKKKS

SEQ ID NO: 12302 - protein, 5 aa, Homo sapiens
SRKGN

SEQ ID NO: 12303 - protein, 5 aa, Homo sapiens
ENAAS

SEQ ID NO: 12304 - protein, 5 aa, Homo sapiens
ARGEL

SEQ ID NO: 12305 - protein, 5 aa, Homo sapiens
GRPAL

SEQ ID NO: 12306 - protein, 5 aa, Homo sapiens
GSPHL

SEQ ID NO: 12307 - protein, 5 aa, Homo sapiens
RPALS

SEQ ID NO: 12308 - protein, 5 aa, Homo sapiens
SWLHS

SEQ ID NO: 12309 - protein, 5 aa, Homo sapiens
TVSGA

SEQ ID NO: 12310 - protein, 5 aa, Homo sapiens
KRANK

SEQ ID NO: 12311 - protein, 5 aa, Homo sapiens
SCLLN

SEQ ID NO: 12312 - protein, 5 aa, Homo sapiens
VMIHD

SEQ ID NO: 12313 - protein, 5 aa, Homo sapiens
LTNLF

SEQ ID NO: 12314 - protein, 5 aa, Homo sapiens
ERSGR

SEQ ID NO: 12315 - protein, 5 aa, Homo sapiens
KLKRR

SEQ ID NO: 12316 - protein, 5 aa, Homo sapiens
RRLPE

SEQ ID NO: 12317 - protein, 5 aa, Homo sapiens
GPQAS

SEQ ID NO: 12318 - protein, 5 aa, Homo sapiens
KKKKK

SEQ ID NO: 12319 - protein, 5 aa, Homo sapiens
RCLIL

SEQ ID NO: 12320 - protein, 5 aa, Homo sapiens
RIEYA

SEQ ID NO: 12321 - protein, 5 aa, Homo sapiens
VPEGL

SEQ ID NO: 12322 - protein, 5 aa, Homo sapiens
GITDD

SEQ ID NO: 12323 - protein, 5 aa, Homo sapiens
ALGNP

SEQ ID NO: 12324 - protein, 5 aa, Homo sapiens
GTTSS

SEQ ID NO: 12325 - protein, 5 aa, Homo sapiens
KDTSS

SEQ ID NO: 12326 - protein, 5 aa, Homo sapiens
KIVSR

SEQ ID NO: 12327 - protein, 5 aa, Homo sapiens
EFIDV

SEQ ID NO: 12328 - protein, 5 aa, Homo sapiens
AEEAF

SEQ ID NO: 12329 - protein, 5 aa, Homo sapiens
IWAFE

SEQ ID NO: 12330 - protein, 5 aa, Homo sapiens
PGARS

SEQ ID NO: 12331 - protein, 5 aa, Homo sapiens
FKTVA

SEQ ID NO: 12332 - protein, 5 aa, Homo sapiens
TSCPI

SEQ ID NO: 12333 - protein, 5 aa, Homo sapiens
YLCYV

SEQ ID NO: 12334 - protein, 5 aa, Homo sapiens
PEGHV

SEQ ID NO: 12335 - protein, 5 aa, Homo sapiens
VTVHK

SEQ ID NO: 12336 - protein, 5 aa, Homo sapiens
TIDVC

SEQ ID NO: 12337 - protein, 5 aa, Homo sapiens
DHRFS

SEQ ID NO: 12338 - protein, 5 aa, Homo sapiens
FDTPL

SEQ ID NO: 12339 - protein, 5 aa, Homo sapiens
WDRLR

SEQ ID NO: 12340 - protein, 5 aa, Homo sapiens
MGLLV

SEQ ID NO: 12341 - protein, 5 aa, Homo sapiens
ESQVQ

SEQ ID NO: 12342 - protein, 5 aa, Homo sapiens
NREMR

SEQ ID NO: 12343 - protein, 5 aa, Homo sapiens
LFAPY

SEQ ID NO: 12344 - protein, 5 aa, Homo sapiens
VERQT

SEQ ID NO: 12345 - protein, 5 aa, Homo sapiens
ARRET

SEQ ID NO: 12346 - protein, 5 aa, Homo sapiens
DEIRV

SEQ ID NO: 12347 - protein, 5 aa, Homo sapiens
SLKAG

SEQ ID NO: 12348 - protein, 5 aa, Homo sapiens
REEKT

SEQ ID NO: 12349 - protein, 5 aa, Homo sapiens
EIGAF

SEQ ID NO: 12350 - protein, 5 aa, Homo sapiens
DTEIK

SEQ ID NO: 12351 - protein, 5 aa, Homo sapiens
CGSKL

SEQ ID NO: 12352 - protein, 5 aa, Homo sapiens
LSNME

SEQ ID NO: 12353 - protein, 5 aa, Homo sapiens
MGIRC

SEQ ID NO: 12354 - protein, 5 aa, Homo sapiens
ASNRK

SEQ ID NO: 12355 - protein, 5 aa, Homo sapiens
AFNKI

SEQ ID NO: 12356 - protein, 5 aa, Homo sapiens
KRYAT

SEQ ID NO: 12357 - protein, 5 aa, Homo sapiens
TSVCL

SEQ ID NO: 12358 - protein, 5 aa, Homo sapiens
YEPEA

SEQ ID NO: 12359 - protein, 5 aa, Homo sapiens
KSLGL

SEQ ID NO: 12360 - protein, 5 aa, Homo sapiens
REYYV

SEQ ID NO: 12361 - protein, 5 aa, Homo sapiens
PSSVR

SEQ ID NO: 12362 - protein, 5 aa, Homo sapiens
SAPSP

SEQ ID NO: 12363 - protein, 5 aa, Homo sapiens
LPKRR

SEQ ID NO: 12364 - protein, 5 aa, Homo sapiens
TNLKV

SEQ ID NO: 12365 - protein, 5 aa, Homo sapiens
CSIEA

SEQ ID NO: 12366 - protein, 5 aa, Homo sapiens
SCWQV

SEQ ID NO: 12367 - protein, 5 aa, Homo sapiens
LYKGG

SEQ ID NO: 12368 - protein, 5 aa, Homo sapiens
QGDQT

SEQ ID NO: 12369 - protein, 5 aa, Homo sapiens
RYTIR

SEQ ID NO: 12370 - protein, 5 aa, Homo sapiens
FEQSW

SEQ ID NO: 12371 - protein, 5 aa, Homo sapiens
ILGKT

SEQ ID NO: 12372 - protein, 5 aa, Homo sapiens
RCFVF

SEQ ID NO: 12373 - protein, 5 aa, Homo sapiens
TPWGI

SEQ ID NO: 12374 - protein, 5 aa, Homo sapiens
MGGYD

SEQ ID NO: 12375 - protein, 5 aa, Homo sapiens
EEGED

SEQ ID NO: 12376 - protein, 5 aa, Homo sapiens
LKKAD

SEQ ID NO: 12377 - protein, 5 aa, Homo sapiens
IHTKH

SEQ ID NO: 12378 - protein, 5 aa, Homo sapiens
PENKQ

SEQ ID NO: 12379 - protein, 5 aa, Homo sapiens
YFLMK

SEQ ID NO: 12380 - protein, 5 aa, Homo sapiens
STARA

SEQ ID NO: 12381 - protein, 5 aa, Homo sapiens
AYLHQ

SEQ ID NO: 12382 - protein, 5 aa, Homo sapiens
QIEKN

SEQ ID NO: 12383 - protein, 5 aa, Homo sapiens
FIKAR

SEQ ID NO: 12384 - protein, 5 aa, Homo sapiens
PVSSD

SEQ ID NO: 12385 - protein, 5 aa, Homo sapiens
KKKKK

SEQ ID NO: 12386 - protein, 5 aa, Homo sapiens
SVGLN

SEQ ID NO: 12387 - protein, 5 aa, Homo sapiens
PNGLL

SEQ ID NO: 12388 - protein, 5 aa, Homo sapiens
DGVGD

SEQ ID NO: 12389 - protein, 5 aa, Homo sapiens
YFVIK

SEQ ID NO: 12390 - protein, 5 aa, Homo sapiens
PLLLK

SEQ ID NO: 12391 - protein, 5 aa, Homo sapiens
VTKDQ

SEQ ID NO: 12392 - protein, 5 aa, Homo sapiens
HLLEA

SEQ ID NO: 12393 - protein, 5 aa, Homo sapiens
LTANL

SEQ ID NO: 12394 - protein, 5 aa, Homo sapiens
ESPVN

SEQ ID NO: 12395 - protein, 5 aa, Homo sapiens
CNVTS

SEQ ID NO: 12396 - protein, 5 aa, Homo sapiens
KRKMQ

SEQ ID NO: 12397 - protein, 5 aa, Homo sapiens
GDKQL

SEQ ID NO: 12398 - protein, 5 aa, Homo sapiens
TNEAH

SEQ ID NO: 12399 - protein, 5 aa, Homo sapiens
LKILQ

SEQ ID NO: 12400 - protein, 5 aa, Homo sapiens
PLNEV

SEQ ID NO: 12401 - protein, 5 aa, Homo sapiens
YMVGN

SEQ ID NO: 12402 - protein, 5 aa, Homo sapiens
SPAVA

SEQ ID NO: 12403 - protein, 5 aa, Homo sapiens
KRCKP

SEQ ID NO: 12404 - protein, 5 aa, Homo sapiens
LDCAC

SEQ ID NO: 12405 - protein, 5 aa, Homo sapiens
AQGVV

SEQ ID NO: 12406 - protein, 5 aa, Homo sapiens
IQIHS

SEQ ID NO: 12407 - protein, 5 aa, Homo sapiens
RILDH

SEQ ID NO: 12408 - protein, 5 aa, Homo sapiens
GNWGH

SEQ ID NO: 12409 - protein, 5 aa, Homo sapiens
FERTR

SEQ ID NO: 12410 - protein, 5 aa, Homo sapiens
CPPSS

SEQ ID NO: 12411 - protein, 5 aa, Homo sapiens
PQQQG

SEQ ID NO: 12412 - protein, 5 aa, Homo sapiens
LLAQQ

SEQ ID NO: 12413 - protein, 5 aa, Homo sapiens
EQQSS

SEQ ID NO: 12414 - protein, 5 aa, Homo sapiens
FRSEL

SEQ ID NO: 12415 - protein, 5 aa, Homo sapiens
QLLQD

SEQ ID NO: 12416 - protein, 5 aa, Homo sapiens
SQVYM

SEQ ID NO: 12417 - protein, 5 aa, Homo sapiens
DIKTE

SEQ ID NO: 12418 - protein, 5 aa, Homo sapiens
LSQFV

SEQ ID NO: 12419 - protein, 5 aa, Homo sapiens
WASPD

SEQ ID NO: 12420 - protein, 5 aa, Homo sapiens
PETKI

SEQ ID NO: 12421 - protein, 5 aa, Homo sapiens
LDLEE

SEQ ID NO: 12422 - protein, 5 aa, Homo sapiens
RENSW

SEQ ID NO: 12423 - protein, 5 aa, Homo sapiens
HSGSL

SEQ ID NO: 12424 - protein, 5 aa, Homo sapiens
GYMPQ

SEQ ID NO: 12425 - protein, 5 aa, Homo sapiens
AAGAV

SEQ ID NO: 12426 - protein, 5 aa, Homo sapiens
NELDQ

SEQ ID NO: 12427 - protein, 5 aa, Homo sapiens
KAEDD

SEQ ID NO: 12428 - protein, 5 aa, Homo sapiens
DEWEY

SEQ ID NO: 12429 - protein, 5 aa, Homo sapiens
CRRGS

SEQ ID NO: 12430 - protein, 5 aa, Homo sapiens
FYDLL

SEQ ID NO: 12431 - protein, 5 aa, Homo sapiens
PWPLG

SEQ ID NO: 12432 - protein, 5 aa, Homo sapiens
SGKTK

SEQ ID NO: 12433 - protein, 5 aa, Homo sapiens
PSPQL

SEQ ID NO: 12434 - protein, 5 aa, Homo sapiens
LPMNE

SEQ ID NO: 12435 - protein, 5 aa, Homo sapiens
FANGI

SEQ ID NO: 12436 - protein, 5 aa, Homo sapiens
KDIGQ

SEQ ID NO: 12437 - protein, 5 aa, Homo sapiens
LFSPY

SEQ ID NO: 12438 - protein, 5 aa, Homo sapiens
EFEAL

SEQ ID NO: 12439 - protein, 5 aa, Homo sapiens
GATIL

SEQ ID NO: 12440 - protein, 5 aa, Homo sapiens
PETLV

SEQ ID NO: 12441 - protein, 5 aa, Homo sapiens
GGGVL

SEQ ID NO: 12442 - protein, 5 aa, Homo sapiens
ESAVS

SEQ ID NO: 12443 - protein, 5 aa, Homo sapiens
DTLAL

SEQ ID NO: 12444 - protein, 5 aa, Homo sapiens
AEEEA

SEQ ID NO: 12445 - protein, 5 aa, Homo sapiens
NPLIH

SEQ ID NO: 12446 - protein, 5 aa, Homo sapiens
VNRNV

SEQ ID NO: 12447 - protein, 5 aa, Homo sapiens
KIGII

SEQ ID NO: 12448 - protein, 5 aa, Homo sapiens
HVCLD

SEQ ID NO: 12449 - protein, 5 aa, Homo sapiens
FGLFD

SEQ ID NO: 12450 - protein, 5 aa, Homo sapiens
DSAGP

SEQ ID NO: 12451 - protein, 5 aa, Homo sapiens
HTSRG

SEQ ID NO: 12452 - protein, 5 aa, Homo sapiens
SSFVF

SEQ ID NO: 12453 - protein, 5 aa, Homo sapiens
SKKAE

SEQ ID NO: 12454 - protein, 5 aa, Homo sapiens
VKKTF

SEQ ID NO: 12455 - protein, 5 aa, Homo sapiens
HHGMP

SEQ ID NO: 12456 - protein, 5 aa, Homo sapiens
VGQQS

SEQ ID NO: 12457 - protein, 5 aa, Homo sapiens
SEENE

SEQ ID NO: 12458 - protein, 5 aa, Homo sapiens
NFWNG

SEQ ID NO: 12459 - protein, 5 aa, Homo sapiens
IVSLI

SEQ ID NO: 12460 - protein, 5 aa, Homo sapiens
GPGGS

SEQ ID NO: 12461 - protein, 5 aa, Homo sapiens
EHSAL

SEQ ID NO: 12462 - protein, 5 aa, Homo sapiens
RINPK

SEQ ID NO: 12463 - protein, 5 aa, Homo sapiens
PEFQL

SEQ ID NO: 12464 - protein, 5 aa, Homo sapiens
QPMVM

SEQ ID NO: 12465 - protein, 5 aa, Homo sapiens
FNFGE

SEQ ID NO: 12466 - protein, 5 aa, Homo sapiens
IRWKN

SEQ ID NO: 12467 - protein, 5 aa, Homo sapiens
SHSLG

SEQ ID NO: 12468 - protein, 5 aa, Homo sapiens
LNRCV

SEQ ID NO: 12469 - protein, 5 aa, Homo sapiens
NRVSI

SEQ ID NO: 12470 - protein, 5 aa, Homo sapiens
GCSVA

SEQ ID NO: 12471 - protein, 5 aa, Homo sapiens
AMDFF

SEQ ID NO: 12472 - protein, 5 aa, Homo sapiens
SHRLG

SEQ ID NO: 12473 - protein, 5 aa, Homo sapiens
LEQAS

SEQ ID NO: 12474 - protein, 5 aa, Homo sapiens
RSKLQ

SEQ ID NO: 12475 - protein, 5 aa, Homo sapiens
HIFFK

SEQ ID NO: 12476 - protein, 5 aa, Homo sapiens
TLHKE

SEQ ID NO: 12477 - protein, 5 aa, Homo sapiens
DKENM

SEQ ID NO: 12478 - protein, 5 aa, Homo sapiens
CCACV

SEQ ID NO: 12479 - protein, 5 aa, Homo sapiens
NLDLQ

SEQ ID NO: 12480 - protein, 5 aa, Homo sapiens
LQITT

SEQ ID NO: 12481 - protein, 5 aa, Homo sapiens
NEEQL

SEQ ID NO: 12482 - protein, 5 aa, Homo sapiens
APSQD

SEQ ID NO: 12483 - protein, 5 aa, Homo sapiens
APMTR

SEQ ID NO: 12484 - protein, 5 aa, Homo sapiens
LQKEI

SEQ ID NO: 12485 - protein, 5 aa, Homo sapiens
RRRLS

SEQ ID NO: 12486 - protein, 5 aa, Homo sapiens
DLSPK

SEQ ID NO: 12487 - protein, 5 aa, Homo sapiens
ALKVI

SEQ ID NO: 12488 - protein, 5 aa, Homo sapiens
GDKNL

SEQ ID NO: 12489 - protein, 5 aa, Homo sapiens
PLKCY

SEQ ID NO: 12490 - protein, 5 aa, Homo sapiens
GRYRR

SEQ ID NO: 12491 - protein, 5 aa, Homo sapiens
KPLQP

SEQ ID NO: 12492 - protein, 5 aa, Homo sapiens
TPDAQ

SEQ ID NO: 12493 - protein, 5 aa, Homo sapiens
YEIHC

SEQ ID NO: 12494 - protein, 5 aa, Homo sapiens
TTRFT

SEQ ID NO: 12495 - protein, 5 aa, Homo sapiens
LESHC

SEQ ID NO: 12496 - protein, 5 aa, Homo sapiens
QFYPL

SEQ ID NO: 12497 - protein, 5 aa, Homo sapiens
QKSEL

SEQ ID NO: 12498 - protein, 5 aa, Homo sapiens
LNDYV

SEQ ID NO: 12499 - protein, 5 aa, Homo sapiens
LLPRV

SEQ ID NO: 12500 - protein, 5 aa, Homo sapiens
GLMKN

SEQ ID NO: 12501 - protein, 5 aa, Homo sapiens
SGEKL

SEQ ID NO: 12502 - protein, 5 aa, Homo sapiens
RLKKD

SEQ ID NO: 12503 - protein, 5 aa, Homo sapiens
TLLWT

SEQ ID NO: 12504 - protein, 5 aa, Homo sapiens
LIRYR

SEQ ID NO: 12505 - protein, 5 aa, Homo sapiens
RFTCG

SEQ ID NO: 12506 - protein, 5 aa, Homo sapiens
VTAHF

SEQ ID NO: 12507 - protein, 5 aa, Homo sapiens
LTPFF

SEQ ID NO: 12508 - protein, 5 aa, Homo sapiens
AKGTQ

SEQ ID NO: 12509 - protein, 5 aa, Homo sapiens
LQCIP

SEQ ID NO: 12510 - protein, 5 aa, Homo sapiens
HCLHM

SEQ ID NO: 12511 - protein, 5 aa, Homo sapiens
HATFV

SEQ ID NO: 12512 - protein, 5 aa, Homo sapiens
LAQQR

SEQ ID NO: 12513 - protein, 5 aa, Homo sapiens
NYLKG

SEQ ID NO: 12514 - protein, 5 aa, Homo sapiens
NTTII

SEQ ID NO: 12515 - protein, 5 aa, Homo sapiens
LPRLL

SEQ ID NO: 12516 - protein, 5 aa, Homo sapiens
HQGPL

SEQ ID NO: 12517 - protein, 5 aa, Homo sapiens
MILLL

SEQ ID NO: 12518 - protein, 5 aa, Homo sapiens
LPGKS

SEQ ID NO: 12519 - protein, 5 aa, Homo sapiens
KRKTR

SEQ ID NO: 12520 - protein, 5 aa, Homo sapiens
YKFQV

SEQ ID NO: 12521 - protein, 5 aa, Homo sapiens
RWKFC

SEQ ID NO: 12522 - protein, 5 aa, Homo sapiens
QSVSV

SEQ ID NO: 12523 - protein, 5 aa, Homo sapiens
PWLNS

SEQ ID NO: 12524 - protein, 5 aa, Homo sapiens
ANIMP

SEQ ID NO: 12525 - protein, 5 aa, Homo sapiens
GKYVD

SEQ ID NO: 12526 - protein, 5 aa, Homo sapiens
SCILL

SEQ ID NO: 12527 - protein, 5 aa, Homo sapiens
ELKCR

SEQ ID NO: 12528 - protein, 5 aa, Homo sapiens
EEEEE

SEQ ID NO: 12529 - protein, 5 aa, Homo sapiens
KLPKI

SEQ ID NO: 12530 - protein, 5 aa, Homo sapiens
HLASE

SEQ ID NO: 12531 - protein, 5 aa, Homo sapiens
APAPL

SEQ ID NO: 12532 - protein, 5 aa, Homo sapiens
WECHH

SEQ ID NO: 12533 - protein, 5 aa, Homo sapiens
GSAQS

SEQ ID NO: 12534 - protein, 5 aa, Homo sapiens
EVDTV

SEQ ID NO: 12535 - protein, 5 aa, Homo sapiens
SRKND

SEQ ID NO: 12536 - protein, 5 aa, Homo sapiens
PKSSS

SEQ ID NO: 12537 - protein, 5 aa, Homo sapiens
SWVPG

SEQ ID NO: 12538 - protein, 5 aa, Homo sapiens
IAIEV

SEQ ID NO: 12539 - protein, 5 aa, Homo sapiens
WQCKE

SEQ ID NO: 12540 - protein, 5 aa, Homo sapiens
KSASS

SEQ ID NO: 12541 - protein, 5 aa, Homo sapiens
QTCCF

SEQ ID NO: 12542 - protein, 5 aa, Homo sapiens
KEVLD

SEQ ID NO: 12543 - protein, 5 aa, Homo sapiens
CMEDK

SEQ ID NO: 12544 - protein, 5 aa, Homo sapiens
APKKK

SEQ ID NO: 12545 - protein, 5 aa, Homo sapiens
CRIQQ

SEQ ID NO: 12546 - protein, 5 aa, Homo sapiens
LLARK

SEQ ID NO: 12547 - protein, 5 aa, Homo sapiens
WASNS

SEQ ID NO: 12548 - protein, 5 aa, Homo sapiens
FRGLI

SEQ ID NO: 12549 - protein, 5 aa, Homo sapiens
GREHS

SEQ ID NO: 12550 - protein, 5 aa, Homo sapiens
INLLG

SEQ ID NO: 12551 - protein, 5 aa, Homo sapiens
WKITY

SEQ ID NO: 12552 - protein, 5 aa, Homo sapiens
GFLSQ

SEQ ID NO: 12553 - protein, 5 aa, Homo sapiens
FSRHG

SEQ ID NO: 12554 - protein, 5 aa, Homo sapiens
PSKGL

SEQ ID NO: 12555 - protein, 5 aa, Homo sapiens
LGSYY

SEQ ID NO: 12556 - protein, 5 aa, Homo sapiens
EADCY

SEQ ID NO: 12557 - protein, 5 aa, Homo sapiens
LKIHT

SEQ ID NO: 12558 - protein, 5 aa, Homo sapiens
YRYLQ

SEQ ID NO: 12559 - protein, 5 aa, Homo sapiens
RTHTV

SEQ ID NO: 12560 - protein, 5 aa, Homo sapiens
KTSHP

SEQ ID NO: 12561 - protein, 5 aa, Homo sapiens
VIPPK

SEQ ID NO: 12562 - protein, 5 aa, Homo sapiens
EDILY

SEQ ID NO: 12563 - protein, 5 aa, Homo sapiens
LLKDS

SEQ ID NO: 12564 - protein, 5 aa, Homo sapiens
ERPDF

SEQ ID NO: 12565 - protein, 5 aa, Homo sapiens
LASAV

SEQ ID NO: 12566 - protein, 5 aa, Homo sapiens
VTQRE

SEQ ID NO: 12567 - protein, 5 aa, Homo sapiens
YFLQK

SEQ ID NO: 12568 - protein, 5 aa, Homo sapiens
SLWEY

SEQ ID NO: 12569 - protein, 5 aa, Homo sapiens
DRFDN

SEQ ID NO: 12570 - protein, 5 aa, Homo sapiens
RPAVR

SEQ ID NO: 12571 - protein, 5 aa, Homo sapiens
LGPLR

SEQ ID NO: 12572 - protein, 5 aa, Homo sapiens
AISGC

SEQ ID NO: 12573 - protein, 5 aa, Homo sapiens
LWQNI

SEQ ID NO: 12574 - protein, 5 aa, Homo sapiens
GGTVA

SEQ ID NO: 12575 - protein, 5 aa, Homo sapiens
PREDL

SEQ ID NO: 12576 - protein, 5 aa, Homo sapiens
RSCEV

SEQ ID NO: 12577 - protein, 5 aa, Homo sapiens
MTSHN

SEQ ID NO: 12578 - protein, 5 aa, Homo sapiens
CIDTP

SEQ ID NO: 12579 - protein, 5 aa, Homo sapiens
PRLGS

SEQ ID NO: 12580 - protein, 5 aa, Homo sapiens
KKKKM

SEQ ID NO: 12581 - protein, 5 aa, Homo sapiens
MYGGK

SEQ ID NO: 12582 - protein, 5 aa, Homo sapiens
ILGPL

SEQ ID NO: 12583 - protein, 5 aa, Homo sapiens
ANARL

SEQ ID NO: 12584 - protein, 5 aa, Homo sapiens
QLLMP

SEQ ID NO: 12585 - protein, 5 aa, Homo sapiens
QLVNF

SEQ ID NO: 12586 - protein, 5 aa, Homo sapiens
LLKQQ

SEQ ID NO: 12587 - protein, 5 aa, Homo sapiens
HLGSS

SEQ ID NO: 12588 - protein, 5 aa, Homo sapiens
FRGIQ

SEQ ID NO: 12589 - protein, 5 aa, Homo sapiens
RAGMA

SEQ ID NO: 12590 - protein, 5 aa, Homo sapiens
VLCIM

SEQ ID NO: 12591 - protein, 5 aa, Homo sapiens
PPRGR

SEQ ID NO: 12592 - protein, 5 aa, Homo sapiens
CKTVI

SEQ ID NO: 12593 - protein, 5 aa, Homo sapiens
RKQKI

SEQ ID NO: 12594 - protein, 5 aa, Homo sapiens
RGERA

SEQ ID NO: 12595 - protein, 5 aa, Homo sapiens
WKAEL

SEQ ID NO: 12596 - protein, 5 aa, Homo sapiens
LAQKN

SEQ ID NO: 12597 - protein, 5 aa, Homo sapiens
EDIKK

SEQ ID NO: 12598 - protein, 5 aa, Homo sapiens
ITSLS

SEQ ID NO: 12599 - protein, 5 aa, Homo sapiens
FPPGF

SEQ ID NO: 12600 - protein, 5 aa, Homo sapiens
QHASL

SEQ ID NO: 12601 - protein, 5 aa, Homo sapiens
DELIL

SEQ ID NO: 12602 - protein, 5 aa, Homo sapiens
KQCIS

SEQ ID NO: 12603 - protein, 5 aa, Homo sapiens
ETVQP

SEQ ID NO: 12604 - protein, 5 aa, Homo sapiens
LENLE

SEQ ID NO: 12605 - protein, 5 aa, Homo sapiens
SQLLS

SEQ ID NO: 12606 - protein, 5 aa, Homo sapiens
DHSHS

SEQ ID NO: 12607 - protein, 5 aa, Homo sapiens
VCFMG

SEQ ID NO: 12608 - protein, 5 aa, Homo sapiens
TPQKK

SEQ ID NO: 12609 - protein, 5 aa, Homo sapiens
DNDIM

SEQ ID NO: 12610 - protein, 5 aa, Homo sapiens
QNGGW

SEQ ID NO: 12611 - protein, 5 aa, Homo sapiens
RAERE

SEQ ID NO: 12612 - protein, 5 aa, Homo sapiens
KSADL

SEQ ID NO: 12613 - protein, 5 aa, Homo sapiens
VELTG

SEQ ID NO: 12614 - protein, 5 aa, Homo sapiens
GKEHS

SEQ ID NO: 12615 - protein, 5 aa, Homo sapiens
ARGSV

SEQ ID NO: 12616 - protein, 5 aa, Homo sapiens
GRSSA

SEQ ID NO: 12617 - protein, 5 aa, Homo sapiens
GVATS

SEQ ID NO: 12618 - protein, 5 aa, Homo sapiens
RTLVM

SEQ ID NO: 12619 - protein, 5 aa, Homo sapiens
QGKPF

SEQ ID NO: 12620 - protein, 5 aa, Homo sapiens
DYLFS

SEQ ID NO: 12621 - protein, 5 aa, Homo sapiens
ALSSA

SEQ ID NO: 12622 - protein, 5 aa, Homo sapiens
GGGMF

SEQ ID NO: 12623 - protein, 5 aa, Homo sapiens
VESPD

SEQ ID NO: 12624 - protein, 5 aa, Homo sapiens
SILGF

SEQ ID NO: 12625 - protein, 5 aa, Homo sapiens
STYGL

SEQ ID NO: 12626 - protein, 5 aa, Homo sapiens
ILYAS

SEQ ID NO: 12627 - protein, 5 aa, Homo sapiens
PRPGL

SEQ ID NO: 12628 - protein, 5 aa, Homo sapiens
VATIS

SEQ ID NO: 12629 - protein, 5 aa, Homo sapiens
DDENF

SEQ ID NO: 12630 - protein, 5 aa, Homo sapiens
TLKSK

SEQ ID NO: 12631 - protein, 5 aa, Homo sapiens
TEEEG

SEQ ID NO: 12632 - protein, 5 aa, Homo sapiens
DKIAI

SEQ ID NO: 12633 - protein, 5 aa, Homo sapiens
IHTNK

SEQ ID NO: 12634 - protein, 5 aa, Homo sapiens
KKKRK

SEQ ID NO: 12635 - protein, 5 aa, Homo sapiens
FVISP

SEQ ID NO: 12636 - protein, 5 aa, Homo sapiens
KKVEK

SEQ ID NO: 12637 - protein, 5 aa, Homo sapiens
RELPC

SEQ ID NO: 12638 - protein, 5 aa, Homo sapiens
GRGQA

SEQ ID NO: 12639 - protein, 5 aa, Homo sapiens
ELQAM

SEQ ID NO: 12640 - protein, 5 aa, Homo sapiens
NCVPL

SEQ ID NO: 12641 - protein, 5 aa, Homo sapiens
NFKNS

SEQ ID NO: 12642 - protein, 5 aa, Homo sapiens
WSLHP

SEQ ID NO: 12643 - protein, 5 aa, Homo sapiens
ENGDA

SEQ ID NO: 12644 - protein, 5 aa, Homo sapiens
SGLWW

SEQ ID NO: 12645 - protein, 5 aa, Homo sapiens
FRPIR

SEQ ID NO: 12646 - protein, 5 aa, Homo sapiens
CLHVF

SEQ ID NO: 12647 - protein, 5 aa, Homo sapiens
CGKAF

SEQ ID NO: 12648 - protein, 5 aa, Homo sapiens
DDFVI

SEQ ID NO: 12649 - protein, 5 aa, Homo sapiens
AYRVA

SEQ ID NO: 12650 - protein, 5 aa, Homo sapiens
LALRR

SEQ ID NO: 12651 - protein, 5 aa, Homo sapiens
KHRAH

SEQ ID NO: 12652 - protein, 5 aa, Homo sapiens
TCVVQ

SEQ ID NO: 12653 - protein, 5 aa, Homo sapiens
LVLKD

SEQ ID NO: 12654 - protein, 5 aa, Homo sapiens
KDDLP

SEQ ID NO: 12655 - protein, 5 aa, Homo sapiens
EEEAD

SEQ ID NO: 12656 - protein, 5 aa, Homo sapiens
GDEEI

SEQ ID NO: 12657 - protein, 5 aa, Homo sapiens
LGQRL

SEQ ID NO: 12658 - protein, 5 aa, Homo sapiens
ASPFC

SEQ ID NO: 12659 - protein, 5 aa, Homo sapiens
RPPFS

SEQ ID NO: 12660 - protein, 5 aa, Homo sapiens
GSTPN

SEQ ID NO: 12661 - protein, 5 aa, Homo sapiens
YRKAR

SEQ ID NO: 12662 - protein, 5 aa, Homo sapiens
NSLAE

SEQ ID NO: 12663 - protein, 5 aa, Homo sapiens
DHSSL

SEQ ID NO: 12664 - protein, 5 aa, Homo sapiens
GLQMD

SEQ ID NO: 12665 - protein, 5 aa, Homo sapiens
TQQVN

SEQ ID NO: 12666 - protein, 5 aa, Homo sapiens
KRGKW

SEQ ID NO: 12667 - protein, 5 aa, Homo sapiens
KESSI

SEQ ID NO: 12668 - protein, 5 aa, Homo sapiens
EWLLK

SEQ ID NO: 12669 - protein, 5 aa, Homo sapiens
GTSDN

SEQ ID NO: 12670 - protein, 5 aa, Homo sapiens
PSLRH

SEQ ID NO: 12671 - protein, 5 aa, Homo sapiens
RVSPS

SEQ ID NO: 12672 - protein, 5 aa, Homo sapiens
QPSPG

SEQ ID NO: 12673 - protein, 5 aa, Homo sapiens
PCVLL

SEQ ID NO: 12674 - protein, 5 aa, Homo sapiens
KRTQA

SEQ ID NO: 12675 - protein, 5 aa, Homo sapiens
WETAL

SEQ ID NO: 12676 - protein, 5 aa, Homo sapiens
RPLFC

SEQ ID NO: 12677 - protein, 5 aa, Homo sapiens
DLFVF

SEQ ID NO: 12678 - protein, 5 aa, Homo sapiens
DTHCP

SEQ ID NO: 12679 - protein, 5 aa, Homo sapiens
RARNL

SEQ ID NO: 12680 - protein, 5 aa, Homo sapiens
TAAAA

SEQ ID NO: 12681 - protein, 5 aa, Homo sapiens
AVKAF

SEQ ID NO: 12682 - protein, 5 aa, Homo sapiens
TTTNV

SEQ ID NO: 12683 - protein, 5 aa, Homo sapiens
SLKQM

SEQ ID NO: 12684 - protein, 5 aa, Homo sapiens
LTVES

SEQ ID NO: 12685 - protein, 5 aa, Homo sapiens
PVRGH

SEQ ID NO: 12686 - protein, 5 aa, Homo sapiens
ILPYV

SEQ ID NO: 12687 - protein, 5 aa, Homo sapiens
SIHLR

SEQ ID NO: 12688 - protein, 5 aa, Homo sapiens
EPGTD

SEQ ID NO: 12689 - protein, 5 aa, Homo sapiens
EGPRS

SEQ ID NO: 12690 - protein, 5 aa, Homo sapiens
FHLLG

SEQ ID NO: 12691 - protein, 5 aa, Homo sapiens
LLDIC

SEQ ID NO: 12692 - protein, 5 aa, Homo sapiens
INIII

SEQ ID NO: 12693 - protein, 5 aa, Homo sapiens
QRFLD

SEQ ID NO: 12694 - protein, 5 aa, Homo sapiens
TLAKK

SEQ ID NO: 12695 - protein, 5 aa, Homo sapiens
RQLLK

SEQ ID NO: 12696 - protein, 5 aa, Homo sapiens
VSGQK

SEQ ID NO: 12697 - protein, 5 aa, Homo sapiens
MGEKV

SEQ ID NO: 12698 - protein, 5 aa, Homo sapiens
KTIQV

SEQ ID NO: 12699 - protein, 5 aa, Homo sapiens
WKYCV

SEQ ID NO: 12700 - protein, 5 aa, Homo sapiens
ASSCC

SEQ ID NO: 12701 - protein, 5 aa, Homo sapiens
TQLIF

SEQ ID NO: 12702 - protein, 5 aa, Homo sapiens
FSAHC

SEQ ID NO: 12703 - protein, 5 aa, Homo sapiens
QFRRN

SEQ ID NO: 12704 - protein, 5 aa, Homo sapiens
MVSIS

SEQ ID NO: 12705 - protein, 5 aa, Homo sapiens
TETTV

SEQ ID NO: 12706 - protein, 5 aa, Homo sapiens
LKNKK

SEQ ID NO: 12707 - protein, 5 aa, Homo sapiens
LKQSP

SEQ ID NO: 12708 - protein, 5 aa, Homo sapiens
NTAHQ

SEQ ID NO: 12709 - protein, 5 aa, Homo sapiens
LNMSF

SEQ ID NO: 12710 - protein, 5 aa, Homo sapiens
PYVWD

SEQ ID NO: 12711 - protein, 5 aa, Homo sapiens
GFELS

SEQ ID NO: 12712 - protein, 5 aa, Homo sapiens
DILDC

SEQ ID NO: 12713 - protein, 5 aa, Homo sapiens
DGREL

SEQ ID NO: 12714 - protein, 5 aa, Homo sapiens
CKLDF

SEQ ID NO: 12715 - protein, 5 aa, Homo sapiens
DLNEM

SEQ ID NO: 12716 - protein, 5 aa, Homo sapiens
GLKRR

SEQ ID NO: 12717 - protein, 5 aa, Homo sapiens
LVTIH

SEQ ID NO: 12718 - protein, 5 aa, Homo sapiens
KLKRK

SEQ ID NO: 12719 - protein, 5 aa, Homo sapiens
GSALF

SEQ ID NO: 12720 - protein, 5 aa, Homo sapiens
KKHLG

SEQ ID NO: 12721 - protein, 5 aa, Homo sapiens
MSLDS

SEQ ID NO: 12722 - protein, 5 aa, Homo sapiens
TWVYC

SEQ ID NO: 12723 - protein, 5 aa, Homo sapiens
EECIR

SEQ ID NO: 12724 - protein, 5 aa, Homo sapiens
SGWVM

SEQ ID NO: 12725 - protein, 5 aa, Homo sapiens
SDSAL

SEQ ID NO: 12726 - protein, 5 aa, Homo sapiens
ALAEA

SEQ ID NO: 12727 - protein, 5 aa, Homo sapiens
NLHQA

SEQ ID NO: 12728 - protein, 5 aa, Homo sapiens
PKSQE

SEQ ID NO: 12729 - protein, 5 aa, Homo sapiens
PGRKP

SEQ ID NO: 12730 - protein, 5 aa, Homo sapiens
WKDTL

SEQ ID NO: 12731 - protein, 5 aa, Homo sapiens
LLPRS

SEQ ID NO: 12732 - protein, 5 aa, Homo sapiens
DKLGQ

SEQ ID NO: 12733 - protein, 5 aa, Homo sapiens
LVTSL

SEQ ID NO: 12734 - protein, 5 aa, Homo sapiens
FEMDI

SEQ ID NO: 12735 - protein, 5 aa, Homo sapiens
YGYTI

SEQ ID NO: 12736 - protein, 5 aa, Homo sapiens
DALES

SEQ ID NO: 12737 - protein, 5 aa, Homo sapiens
KVGRY

SEQ ID NO: 12738 - protein, 5 aa, Homo sapiens
PPKSK

SEQ ID NO: 12739 - protein, 5 aa, Homo sapiens
DTYLQ

SEQ ID NO: 12740 - protein, 5 aa, Homo sapiens
KKLKK

SEQ ID NO: 12741 - protein, 5 aa, Homo sapiens
RKMDL

SEQ ID NO: 12742 - protein, 5 aa, Homo sapiens
MLKRT

SEQ ID NO: 12743 - protein, 5 aa, Homo sapiens
LNLSI

SEQ ID NO: 12744 - protein, 5 aa, Homo sapiens
TRRIY

SEQ ID NO: 12745 - protein, 5 aa, Homo sapiens
PTDLP

SEQ ID NO: 12746 - protein, 5 aa, Homo sapiens
KTASA

SEQ ID NO: 12747 - protein, 5 aa, Homo sapiens
ILGPL

SEQ ID NO: 12748 - protein, 5 aa, Homo sapiens
TFGIP

SEQ ID NO: 12749 - protein, 5 aa, Homo sapiens
QPEEN

SEQ ID NO: 12750 - protein, 5 aa, Homo sapiens
YRYLQ

SEQ ID NO: 12751 - protein, 5 aa, Homo sapiens
VAPSN

SEQ ID NO: 12752 - protein, 5 aa, Homo sapiens
KRKKK

SEQ ID NO: 12753 - protein, 5 aa, Homo sapiens
KKTIL

SEQ ID NO: 12754 - protein, 5 aa, Homo sapiens
AKQGL

SEQ ID NO: 12755 - protein, 5 aa, Homo sapiens
EEKSD

SEQ ID NO: 12756 - protein, 5 aa, Homo sapiens
KKKGK

SEQ ID NO: 12757 - protein, 5 aa, Homo sapiens
DEDSD

SEQ ID NO: 12758 - protein, 5 aa, Homo sapiens
PPLQP

SEQ ID NO: 12759 - protein, 5 aa, Homo sapiens
SSHSS

SEQ ID NO: 12760 - protein, 5 aa, Homo sapiens
AAQGS

SEQ ID NO: 12761 - protein, 5 aa, Homo sapiens
WDRDM

SEQ ID NO: 12762 - protein, 5 aa, Homo sapiens
LKKEK

SEQ ID NO: 12763 - protein, 5 aa, Homo sapiens
EGWAT

SEQ ID NO: 12764 - protein, 5 aa, Homo sapiens
PESES

SEQ ID NO: 12765 - protein, 5 aa, Homo sapiens
TAPAW

SEQ ID NO: 12766 - protein, 5 aa, Homo sapiens
SNYTR

SEQ ID NO: 12767 - protein, 5 aa, Homo sapiens
PPWEP

SEQ ID NO: 12768 - protein, 5 aa, Homo sapiens
EETNR

SEQ ID NO: 12769 - protein, 5 aa, Homo sapiens
KENSE

SEQ ID NO: 12770 - protein, 5 aa, Homo sapiens
EEEEG

SEQ ID NO: 12771 - protein, 5 aa, Homo sapiens
CQDGY

SEQ ID NO: 12772 - protein, 5 aa, Homo sapiens
IAVKP

SEQ ID NO: 12773 - protein, 5 aa, Homo sapiens
QTAAV

SEQ ID NO: 12774 - protein, 5 aa, Homo sapiens
TKSDG

SEQ ID NO: 12775 - protein, 5 aa, Homo sapiens
ESDEL

SEQ ID NO: 12776 - protein, 5 aa, Homo sapiens
EKGKE

SEQ ID NO: 12777 - protein, 5 aa, Homo sapiens
YYSHA

SEQ ID NO: 12778 - protein, 5 aa, Homo sapiens
SFQDR

SEQ ID NO: 12779 - protein, 5 aa, Homo sapiens
EDRGW

SEQ ID NO: 12780 - protein, 5 aa, Homo sapiens
VIPGH

SEQ ID NO: 12781 - protein, 5 aa, Homo sapiens
QEPQS

SEQ ID NO: 12782 - protein, 5 aa, Homo sapiens
WSKSD

SEQ ID NO: 12783 - protein, 5 aa, Homo sapiens
KRECK

SEQ ID NO: 12784 - protein, 5 aa, Homo sapiens
HKSSH

SEQ ID NO: 12785 - protein, 5 aa, Homo sapiens
ANGIQ

SEQ ID NO: 12786 - protein, 5 aa, Homo sapiens
RRVKR

SEQ ID NO: 12787 - protein, 5 aa, Homo sapiens
NPISV

SEQ ID NO: 12788 - protein, 5 aa, Homo sapiens
GSIGF

SEQ ID NO: 12789 - protein, 5 aa, Homo sapiens
VFTCK

SEQ ID NO: 12790 - protein, 5 aa, Homo sapiens
PSPPA

SEQ ID NO: 12791 - protein, 5 aa, Homo sapiens
SPAST

SEQ ID NO: 12792 - protein, 5 aa, Homo sapiens
KKKRD

SEQ ID NO: 12793 - protein, 5 aa, Homo sapiens
WGPGS

SEQ ID NO: 12794 - protein, 5 aa, Homo sapiens
KELSL

SEQ ID NO: 12795 - protein, 5 aa, Homo sapiens
GGTVA

SEQ ID NO: 12796 - protein, 5 aa, Homo sapiens
GESNV

SEQ ID NO: 12797 - protein, 5 aa, Homo sapiens
VVQYH

SEQ ID NO: 12798 - protein, 5 aa, Homo sapiens
PPGLL

SEQ ID NO: 12799 - protein, 5 aa, Homo sapiens
DDWSN

SEQ ID NO: 12800 - protein, 5 aa, Homo sapiens
KAKGK

SEQ ID NO: 12801 - protein, 5 aa, Homo sapiens
NKLDY

SEQ ID NO: 12802 - protein, 5 aa, Homo sapiens
NTKVF

SEQ ID NO: 12803 - protein, 5 aa, Homo sapiens
HLGQV

SEQ ID NO: 12804 - protein, 5 aa, Homo sapiens
PPFPF

SEQ ID NO: 12805 - protein, 5 aa, Homo sapiens
KYQIE

SEQ ID NO: 12806 - protein, 5 aa, Homo sapiens
APPLG

SEQ ID NO: 12807 - protein, 5 aa, Homo sapiens
TRFHC

SEQ ID NO: 12808 - protein, 5 aa, Homo sapiens
RNIHT

SEQ ID NO: 12809 - protein, 5 aa, Homo sapiens
EMIPK

SEQ ID NO: 12810 - protein, 5 aa, Homo sapiens
TGERP

SEQ ID NO: 12811 - protein, 5 aa, Homo sapiens
APRIL

SEQ ID NO: 12812 - protein, 5 aa, Homo sapiens
SEPSF

SEQ ID NO: 12813 - protein, 5 aa, Homo sapiens
MCLHR

SEQ ID NO: 12814 - protein, 5 aa, Homo sapiens
AASED

SEQ ID NO: 12815 - protein, 5 aa, Homo sapiens
LMQSS

SEQ ID NO: 12816 - protein, 5 aa, Homo sapiens
PEQIH

SEQ ID NO: 12817 - protein, 5 aa, Homo sapiens
RGSLS

SEQ ID NO: 12818 - protein, 5 aa, Homo sapiens
ARVVT

SEQ ID NO: 12819 - protein, 5 aa, Homo sapiens
ATSKK

SEQ ID NO: 12820 - protein, 5 aa, Homo sapiens
SNASR

SEQ ID NO: 12821 - protein, 5 aa, Homo sapiens
SLSVR

SEQ ID NO: 12822 - protein, 5 aa, Homo sapiens
CHLLH

SEQ ID NO: 12823 - protein, 5 aa, Homo sapiens
DSDSD

SEQ ID NO: 12824 - protein, 5 aa, Homo sapiens
DFGNY

SEQ ID NO: 12825 - protein, 5 aa, Homo sapiens
IHTGE

SEQ ID NO: 12826 - protein, 5 aa, Homo sapiens
IDTGE

SEQ ID NO: 12827 - protein, 5 aa, Homo sapiens
LFIQT

SEQ ID NO: 12828 - protein, 5 aa, Homo sapiens
VPEKD

SEQ ID NO: 12829 - protein, 5 aa, Homo sapiens
PRPHF

SEQ ID NO: 12830 - protein, 5 aa, Homo sapiens
KTYTV

SEQ ID NO: 12831 - protein, 5 aa, Homo sapiens
GAPQP

SEQ ID NO: 12832 - protein, 5 aa, Homo sapiens
PFPRS

SEQ ID NO: 12833 - protein, 5 aa, Homo sapiens
DNEGE

SEQ ID NO: 12834 - protein, 5 aa, Homo sapiens
NGGLA

SEQ ID NO: 12835 - protein, 5 aa, Homo sapiens
GGGWL

SEQ ID NO: 12836 - protein, 5 aa, Homo sapiens
SGKKP

SEQ ID NO: 12837 - protein, 5 aa, Homo sapiens
QKLFP

SEQ ID NO: 12838 - protein, 5 aa, Homo sapiens
ASSSS

SEQ ID NO: 12839 - protein, 5 aa, Homo sapiens
IKELF

SEQ ID NO: 12840 - protein, 5 aa, Homo sapiens
SGRRF

SEQ ID NO: 12841 - protein, 5 aa, Homo sapiens
EEEVA

SEQ ID NO: 12842 - protein, 5 aa, Homo sapiens
QSHKD

SEQ ID NO: 12843 - protein, 5 aa, Homo sapiens
TRRRR

SEQ ID NO: 12844 - protein, 5 aa, Homo sapiens
TWDGG

SEQ ID NO: 12845 - protein, 5 aa, Homo sapiens
PGVGS

SEQ ID NO: 12846 - protein, 5 aa, Homo sapiens
VREEG

SEQ ID NO: 12847 - protein, 5 aa, Homo sapiens
GEFLY

SEQ ID NO: 12848 - protein, 5 aa, Homo sapiens
ITFDD

SEQ ID NO: 12849 - protein, 5 aa, Homo sapiens
PEQQC

SEQ ID NO: 12850 - protein, 5 aa, Homo sapiens
GAVSV

SEQ ID NO: 12851 - protein, 5 aa, Homo sapiens
PDAVC

SEQ ID NO: 12852 - protein, 5 aa, Homo sapiens
KKLKT

SEQ ID NO: 12853 - protein, 5 aa, Homo sapiens
AQDGH

SEQ ID NO: 12854 - protein, 5 aa, Homo sapiens
IANTV

SEQ ID NO: 12855 - protein, 5 aa, Homo sapiens
CQTLI

SEQ ID NO: 12856 - protein, 5 aa, Homo sapiens
PDFDD

SEQ ID NO: 12857 - protein, 5 aa, Homo sapiens
RKATS

SEQ ID NO: 12858 - protein, 5 aa, Homo sapiens
SNLTL

SEQ ID NO: 12859 - protein, 5 aa, Homo sapiens
SKGLC

SEQ ID NO: 12860 - protein, 5 aa, Homo sapiens
RTCRK

SEQ ID NO: 12861 - protein, 5 aa, Homo sapiens
LSTLK

SEQ ID NO: 12862 - protein, 5 aa, Homo sapiens
FPLCP

SEQ ID NO: 12863 - protein, 5 aa, Homo sapiens
ARVEL

SEQ ID NO: 12864 - protein, 5 aa, Homo sapiens
KWNPL

SEQ ID NO: 12865 - protein, 5 aa, Homo sapiens
VKIMK

SEQ ID NO: 12866 - protein, 5 aa, Homo sapiens
HTILP

SEQ ID NO: 12867 - protein, 5 aa, Homo sapiens
TASLY

SEQ ID NO: 12868 - protein, 5 aa, Homo sapiens
SDTSN

SEQ ID NO: 12869 - protein, 5 aa, Homo sapiens
RSPPW

SEQ ID NO: 12870 - protein, 5 aa, Homo sapiens
GEDDS

SEQ ID NO: 12871 - protein, 5 aa, Homo sapiens
KELEK

SEQ ID NO: 12872 - protein, 5 aa, Homo sapiens
LTLPP

SEQ ID NO: 12873 - protein, 5 aa, Homo sapiens
DKLGQ

SEQ ID NO: 12874 - protein, 5 aa, Homo sapiens
TTGST

SEQ ID NO: 12875 - protein, 5 aa, Homo sapiens
INVCL

SEQ ID NO: 12876 - protein, 5 aa, Homo sapiens
EAKEY

SEQ ID NO: 12877 - protein, 5 aa, Homo sapiens
QKLHE

SEQ ID NO: 12878 - protein, 5 aa, Homo sapiens
PQMKG

SEQ ID NO: 12879 - protein, 5 aa, Homo sapiens
LLPYA

SEQ ID NO: 12880 - protein, 5 aa, Homo sapiens
KKEKN

SEQ ID NO: 12881 - protein, 5 aa, Homo sapiens
EDFSM

SEQ ID NO: 12882 - protein, 5 aa, Homo sapiens
GEAIK

SEQ ID NO: 12883 - protein, 5 aa, Homo sapiens
AKDSL

SEQ ID NO: 12884 - protein, 5 aa, Homo sapiens
TKPAG

SEQ ID NO: 12885 - protein, 5 aa, Homo sapiens
RGCGG

SEQ ID NO: 12886 - protein, 5 aa, Homo sapiens
PQPLD

SEQ ID NO: 12887 - protein, 5 aa, Homo sapiens
GDESY

SEQ ID NO: 12888 - protein, 5 aa, Homo sapiens
CMTSQ

SEQ ID NO: 12889 - protein, 5 aa, Homo sapiens
FCSKK

SEQ ID NO: 12890 - protein, 5 aa, Homo sapiens
EPMEC

SEQ ID NO: 12891 - protein, 5 aa, Homo sapiens
EKYIL

SEQ ID NO: 12892 - protein, 5 aa, Homo sapiens
AKGSK

SEQ ID NO: 12893 - protein, 5 aa, Homo sapiens
RFSSP

SEQ ID NO: 12894 - protein, 5 aa, Homo sapiens
PLLEH

SEQ ID NO: 12895 - protein, 5 aa, Homo sapiens
QRVTK

SEQ ID NO: 12896 - protein, 5 aa, Homo sapiens
YMAED

SEQ ID NO: 12897 - protein, 5 aa, Homo sapiens
AQTRL

SEQ ID NO: 12898 - protein, 5 aa, Homo sapiens
ASREP

SEQ ID NO: 12899 - protein, 5 aa, Homo sapiens
MDTGR

SEQ ID NO: 12900 - protein, 5 aa, Homo sapiens
LLPLQ

SEQ ID NO: 12901 - protein, 5 aa, Homo sapiens
GSRSS

SEQ ID NO: 12902 - protein, 5 aa, Homo sapiens
VRDTM

SEQ ID NO: 12903 - protein, 5 aa, Homo sapiens
KQAAG

SEQ ID NO: 12904 - protein, 5 aa, Homo sapiens
EKEPS

SEQ ID NO: 12905 - protein, 5 aa, Homo sapiens
SHPWK

SEQ ID NO: 12906 - protein, 5 aa, Homo sapiens
VGSDP

SEQ ID NO: 12907 - protein, 5 aa, Homo sapiens
KRAWP

SEQ ID NO: 12908 - protein, 5 aa, Homo sapiens
PEFSV

SEQ ID NO: 12909 - protein, 5 aa, Homo sapiens
RLSRT

SEQ ID NO: 12910 - protein, 5 aa, Homo sapiens
QKEQK

SEQ ID NO: 12911 - protein, 5 aa, Homo sapiens
HCAYL

SEQ ID NO: 12912 - protein, 5 aa, Homo sapiens
GQNFG

SEQ ID NO: 12913 - protein, 5 aa, Homo sapiens
QVVWR

SEQ ID NO: 12914 - protein, 5 aa, Homo sapiens
SPSLT

SEQ ID NO: 12915 - protein, 5 aa, Homo sapiens
SQSVR

SEQ ID NO: 12916 - protein, 5 aa, Homo sapiens
AESKL

SEQ ID NO: 12917 - protein, 5 aa, Homo sapiens
NWVQF

SEQ ID NO: 12918 - protein, 5 aa, Homo sapiens
FPPGF

SEQ ID NO: 12919 - protein, 5 aa, Homo sapiens
APCSV

SEQ ID NO: 12920 - protein, 5 aa, Homo sapiens
SPGAP

SEQ ID NO: 12921 - protein, 5 aa, Homo sapiens
GPAED

SEQ ID NO: 12922 - protein, 5 aa, Homo sapiens
WKYCE

SEQ ID NO: 12923 - protein, 5 aa, Homo sapiens
TVQQR

SEQ ID NO: 12924 - protein, 5 aa, Homo sapiens
TVLYE

SEQ ID NO: 12925 - protein, 5 aa, Homo sapiens
KKKYI

SEQ ID NO: 12926 - protein, 5 aa, Homo sapiens
DDTLL

SEQ ID NO: 12927 - protein, 5 aa, Homo sapiens
PVSWG

SEQ ID NO: 12928 - protein, 5 aa, Homo sapiens
ESDDG

SEQ ID NO: 12929 - protein, 5 aa, Homo sapiens
GLYCE

SEQ ID NO: 12930 - protein, 5 aa, Homo sapiens
ACISG

SEQ ID NO: 12931 - protein, 5 aa, Homo sapiens
ECRQM

SEQ ID NO: 12932 - protein, 5 aa, Homo sapiens
ELQAM

SEQ ID NO: 12933 - protein, 5 aa, Homo sapiens
LSFSA

SEQ ID NO: 12934 - protein, 5 aa, Homo sapiens
SGRRF

SEQ ID NO: 12935 - protein, 5 aa, Homo sapiens
CCNWA

SEQ ID NO: 12936 - protein, 5 aa, Homo sapiens
SFLRQ

SEQ ID NO: 12937 - protein, 5 aa, Homo sapiens
KKFES

SEQ ID NO: 12938 - protein, 5 aa, Homo sapiens
PRRRR

SEQ ID NO: 12939 - protein, 5 aa, Homo sapiens
PEISP

SEQ ID NO: 12940 - protein, 5 aa, Homo sapiens
FTGHL

SEQ ID NO: 12941 - protein, 5 aa, Homo sapiens
FPTKP

SEQ ID NO: 12942 - protein, 5 aa, Homo sapiens
LLYDE

SEQ ID NO: 12943 - protein, 5 aa, Homo sapiens
IQPLI

SEQ ID NO: 12944 - protein, 5 aa, Homo sapiens
AVATT

SEQ ID NO: 12945 - protein, 5 aa, Homo sapiens
LGLVA

SEQ ID NO: 12946 - protein, 5 aa, Homo sapiens
LDQTT

SEQ ID NO: 12947 - protein, 5 aa, Homo sapiens
QAQRS

SEQ ID NO: 12948 - protein, 5 aa, Homo sapiens
RPMKH

SEQ ID NO: 12949 - protein, 5 aa, Homo sapiens
EFTSS

SEQ ID NO: 12950 - protein, 5 aa, Homo sapiens
LQLKT

SEQ ID NO: 12951 - protein, 5 aa, Homo sapiens
QAKQQ

SEQ ID NO: 12952 - protein, 5 aa, Homo sapiens
RSEMK

SEQ ID NO: 12953 - protein, 5 aa, Homo sapiens
EAKYY

SEQ ID NO: 12954 - protein, 5 aa, Homo sapiens
FWARL

SEQ ID NO: 12955 - protein, 5 aa, Homo sapiens
SDILK

SEQ ID NO: 12956 - protein, 5 aa, Homo sapiens
CAMNC

SEQ ID NO: 12957 - protein, 5 aa, Homo sapiens
DCVLG

SEQ ID NO: 12958 - protein, 5 aa, Homo sapiens
PRRPC

SEQ ID NO: 12959 - protein, 5 aa, Homo sapiens
IVVPT

SEQ ID NO: 12960 - protein, 5 aa, Homo sapiens
HRKAL

SEQ ID NO: 12961 - protein, 5 aa, Homo sapiens
LYEVM

SEQ ID NO: 12962 - protein, 5 aa, Homo sapiens
ISFQS

SEQ ID NO: 12963 - protein, 5 aa, Homo sapiens
HHIKI

SEQ ID NO: 12964 - protein, 5 aa, Homo sapiens
FPPTK

SEQ ID NO: 12965 - protein, 5 aa, Homo sapiens
PSMST

SEQ ID NO: 12966 - protein, 5 aa, Homo sapiens
RFSSS

SEQ ID NO: 12967 - protein, 5 aa, Homo sapiens
TGEKP

SEQ ID NO: 12968 - protein, 5 aa, Homo sapiens
RFSIN

SEQ ID NO: 12969 - protein, 5 aa, Homo sapiens
KVTTF

SEQ ID NO: 12970 - protein, 5 aa, Homo sapiens
LFDEI

SEQ ID NO: 12971 - protein, 5 aa, Homo sapiens
SEAKK

SEQ ID NO: 12972 - protein, 5 aa, Homo sapiens
TAWMQ

SEQ ID NO: 12973 - protein, 5 aa, Homo sapiens
EKPCE

SEQ ID NO: 12974 - protein, 5 aa, Homo sapiens
EDDYI

SEQ ID NO: 12975 - protein, 5 aa, Homo sapiens
YTPQP

SEQ ID NO: 12976 - protein, 5 aa, Homo sapiens
KQAKK

SEQ ID NO: 12977 - protein, 5 aa, Homo sapiens
EEDVE

SEQ ID NO: 12978 - protein, 5 aa, Homo sapiens
QQGLP

SEQ ID NO: 12979 - protein, 5 aa, Homo sapiens
DGSGD

SEQ ID NO: 12980 - protein, 5 aa, Homo sapiens
DSKSG

SEQ ID NO: 12981 - protein, 5 aa, Homo sapiens
LENRP

SEQ ID NO: 12982 - protein, 5 aa, Homo sapiens
YWEKI

SEQ ID NO: 12983 - protein, 5 aa, Homo sapiens
IKGIM

SEQ ID NO: 12984 - protein, 5 aa, Homo sapiens
SPVKA

SEQ ID NO: 12985 - protein, 5 aa, Homo sapiens
DSDLE

SEQ ID NO: 12986 - protein, 5 aa, Homo sapiens
RVYFQ

SEQ ID NO: 12987 - protein, 5 aa, Homo sapiens
LLPPT

SEQ ID NO: 12988 - protein, 5 aa, Homo sapiens
TTRPL

SEQ ID NO: 12989 - protein, 5 aa, Homo sapiens
ARHFS

SEQ ID NO: 12990 - protein, 5 aa, Homo sapiens
HISIA

SEQ ID NO: 12991 - protein, 5 aa, Homo sapiens
VATGI

SEQ ID NO: 12992 - protein, 5 aa, Homo sapiens
PKLVS

SEQ ID NO: 12993 - protein, 5 aa, Homo sapiens
HLASE

SEQ ID NO: 12994 - protein, 5 aa, Homo sapiens
NPIGK

SEQ ID NO: 12995 - protein, 5 aa, Homo sapiens
AIHGG

SEQ ID NO: 12996 - protein, 5 aa, Homo sapiens
GRSLP

SEQ ID NO: 12997 - protein, 5 aa, Homo sapiens
IANNG

SEQ ID NO: 12998 - protein, 5 aa, Homo sapiens
VQLRE

SEQ ID NO: 12999 - protein, 5 aa, Homo sapiens
EDTEM

SEQ ID NO: 13000 - protein, 5 aa, Homo sapiens
VLFIK

SEQ ID NO: 13001 - protein, 5 aa, Homo sapiens
RRRLS

SEQ ID NO: 13002 - protein, 5 aa, Homo sapiens
PVPGG

SEQ ID NO: 13003 - protein, 5 aa, Homo sapiens
PGDPF

SEQ ID NO: 13004 - protein, 5 aa, Homo sapiens
EWGNS

SEQ ID NO: 13005 - protein, 5 aa, Homo sapiens
QCREM

SEQ ID NO: 13006 - protein, 5 aa, Homo sapiens
GKGGW

SEQ ID NO: 13007 - protein, 5 aa, Homo sapiens
VKGKP

SEQ ID NO: 13008 - protein, 5 aa, Homo sapiens
EQPQV

SEQ ID NO: 13009 - protein, 5 aa, Homo sapiens
PRGEM

SEQ ID NO: 13010 - protein, 5 aa, Homo sapiens
SLLPF

SEQ ID NO: 13011 - protein, 5 aa, Homo sapiens
PIRQY

SEQ ID NO: 13012 - protein, 5 aa, Homo sapiens
LQEEP

SEQ ID NO: 13013 - protein, 5 aa, Homo sapiens
LLQSN

SEQ ID NO: 13014 - protein, 5 aa, Homo sapiens
ASPRS

SEQ ID NO: 13015 - protein, 5 aa, Homo sapiens
RNTVV

SEQ ID NO: 13016 - protein, 5 aa, Homo sapiens
GKPQL

SEQ ID NO: 13017 - protein, 5 aa, Homo sapiens
EGAMY

SEQ ID NO: 13018 - protein, 5 aa, Homo sapiens
AAIKL

SEQ ID NO: 13019 - protein, 5 aa, Homo sapiens
QLEAY

SEQ ID NO: 13020 - protein, 5 aa, Homo sapiens
TRRLD

SEQ ID NO: 13021 - protein, 5 aa, Homo sapiens
PPFPT

SEQ ID NO: 13022 - protein, 5 aa, Homo sapiens
SKRNF

SEQ ID NO: 13023 - protein, 5 aa, Homo sapiens
REDNV

SEQ ID NO: 13024 - protein, 5 aa, Homo sapiens
TSDEN

SEQ ID NO: 13025 - protein, 5 aa, Homo sapiens
FIMVN

SEQ ID NO: 13026 - protein, 5 aa, Homo sapiens
IPELQ

SEQ ID NO: 13027 - protein, 5 aa, Homo sapiens
SQPLC

SEQ ID NO: 13028 - protein, 5 aa, Homo sapiens
TPLLL

SEQ ID NO: 13029 - protein, 5 aa, Homo sapiens
RGKTH

SEQ ID NO: 13030 - protein, 5 aa, Homo sapiens
PETSV

SEQ ID NO: 13031 - protein, 5 aa, Homo sapiens
PGVPP

SEQ ID NO: 13032 - protein, 5 aa, Homo sapiens
PTEHA

SEQ ID NO: 13033 - protein, 5 aa, Homo sapiens
SNSRG

SEQ ID NO: 13034 - protein, 5 aa, Homo sapiens
LIAGK

SEQ ID NO: 13035 - protein, 5 aa, Homo sapiens
VIFRS

SEQ ID NO: 13036 - protein, 5 aa, Homo sapiens
NSPIS

SEQ ID NO: 13037 - protein, 5 aa, Homo sapiens
ALFFL

SEQ ID NO: 13038 - protein, 5 aa, Homo sapiens
AARHL

SEQ ID NO: 13039 - protein, 5 aa, Homo sapiens
LKNPQ

SEQ ID NO: 13040 - protein, 5 aa, Homo sapiens
LGIFY

SEQ ID NO: 13041 - protein, 5 aa, Homo sapiens
LNLSS

SEQ ID NO: 13042 - protein, 5 aa, Homo sapiens
VHEED

SEQ ID NO: 13043 - protein, 5 aa, Homo sapiens
LRPLA

SEQ ID NO: 13044 - protein, 5 aa, Homo sapiens
CPITL

SEQ ID NO: 13045 - protein, 5 aa, Homo sapiens
MTALL

SEQ ID NO: 13046 - protein, 5 aa, Homo sapiens
AESGT

SEQ ID NO: 13047 - protein, 5 aa, Homo sapiens
DQGVH

SEQ ID NO: 13048 - protein, 5 aa, Homo sapiens
CHSIA

SEQ ID NO: 13049 - protein, 5 aa, Homo sapiens
RRQKK

SEQ ID NO: 13050 - protein, 5 aa, Homo sapiens
ASNYV

SEQ ID NO: 13051 - protein, 5 aa, Homo sapiens
LMVNT

SEQ ID NO: 13052 - protein, 5 aa, Homo sapiens
NKILF

SEQ ID NO: 13053 - protein, 5 aa, Homo sapiens
KKNNF

SEQ ID NO: 13054 - protein, 5 aa, Homo sapiens
WDVHE

SEQ ID NO: 13055 - protein, 5 aa, Homo sapiens
ADVEP

SEQ ID NO: 13056 - protein, 5 aa, Homo sapiens
SKLTS

SEQ ID NO: 13057 - protein, 5 aa, Homo sapiens
SKLGT

SEQ ID NO: 13058 - protein, 5 aa, Homo sapiens
GPVLM

SEQ ID NO: 13059 - protein, 5 aa, Homo sapiens
SYSLA

SEQ ID NO: 13060 - protein, 5 aa, Homo sapiens
GGKKD

SEQ ID NO: 13061 - protein, 5 aa, Homo sapiens
EEPSS

SEQ ID NO: 13062 - protein, 5 aa, Homo sapiens
VGVTV

SEQ ID NO: 13063 - protein, 5 aa, Homo sapiens
FRRKG

SEQ ID NO: 13064 - protein, 5 aa, Homo sapiens
EEDEE

SEQ ID NO: 13065 - protein, 5 aa, Homo sapiens
SIPLA

SEQ ID NO: 13066 - protein, 5 aa, Homo sapiens
LLLPS

SEQ ID NO: 13067 - protein, 5 aa, Homo sapiens
SPSIS

SEQ ID NO: 13068 - protein, 5 aa, Homo sapiens
LSMVL

SEQ ID NO: 13069 - protein, 5 aa, Homo sapiens
NTGSR

SEQ ID NO: 13070 - protein, 5 aa, Homo sapiens
EEASR

SEQ ID NO: 13071 - protein, 5 aa, Homo sapiens
FAVRN

SEQ ID NO: 13072 - protein, 5 aa, Homo sapiens
LSVGK

SEQ ID NO: 13073 - protein, 5 aa, Homo sapiens
TRTSH

SEQ ID NO: 13074 - protein, 5 aa, Homo sapiens
LPSSS

SEQ ID NO: 13075 - protein, 5 aa, Homo sapiens
PTMGR

SEQ ID NO: 13076 - protein, 5 aa, Homo sapiens
KGLML

SEQ ID NO: 13077 - protein, 5 aa, Homo sapiens
ATKPS

SEQ ID NO: 13078 - protein, 5 aa, Homo sapiens
RQSIF

SEQ ID NO: 13079 - protein, 5 aa, Homo sapiens
EKLYK

SEQ ID NO: 13080 - protein, 5 aa, Homo sapiens
HLQNY

SEQ ID NO: 13081 - protein, 5 aa, Homo sapiens
RYFTF

SEQ ID NO: 13082 - protein, 5 aa, Homo sapiens
FNEVG

SEQ ID NO: 13083 - protein, 5 aa, Homo sapiens
SVKIT

SEQ ID NO: 13084 - protein, 5 aa, Homo sapiens
AQAGS

SEQ ID NO: 13085 - protein, 5 aa, Homo sapiens
ALGSF

SEQ ID NO: 13086 - protein, 5 aa, Homo sapiens
ELEYL

SEQ ID NO: 13087 - protein, 5 aa, Homo sapiens
RAHLS

SEQ ID NO: 13088 - protein, 5 aa, Homo sapiens
IQTEI

SEQ ID NO: 13089 - protein, 5 aa, Homo sapiens
TPPEP

SEQ ID NO: 13090 - protein, 5 aa, Homo sapiens
GAQRL

SEQ ID NO: 13091 - protein, 5 aa, Homo sapiens
KITVI

SEQ ID NO: 13092 - protein, 5 aa, Homo sapiens
AHSTL

SEQ ID NO: 13093 - protein, 5 aa, Homo sapiens
EVINK

SEQ ID NO: 13094 - protein, 5 aa, Homo sapiens
ARAAS

SEQ ID NO: 13095 - protein, 5 aa, Homo sapiens
PMRLY

SEQ ID NO: 13096 - protein, 5 aa, Homo sapiens
RRILE

SEQ ID NO: 13097 - protein, 5 aa, Homo sapiens
LWAGP

SEQ ID NO: 13098 - protein, 5 aa, Homo sapiens
LQHSK

SEQ ID NO: 13099 - protein, 5 aa, Homo sapiens
VMSTI

SEQ ID NO: 13100 - protein, 5 aa, Homo sapiens
GVEEI

SEQ ID NO: 13101 - protein, 5 aa, Homo sapiens
KVALR

SEQ ID NO: 13102 - protein, 5 aa, Homo sapiens
RPQAP

SEQ ID NO: 13103 - protein, 5 aa, Homo sapiens
PTKSS

SEQ ID NO: 13104 - protein, 5 aa, Homo sapiens
LKFTS

SEQ ID NO: 13105 - protein, 5 aa, Homo sapiens
DKLGQ

SEQ ID NO: 13106 - protein, 5 aa, Homo sapiens
MEVWT

SEQ ID NO: 13107 - protein, 5 aa, Homo sapiens
KRLQI

SEQ ID NO: 13108 - protein, 5 aa, Homo sapiens
AKYTT

SEQ ID NO: 13109 - protein, 5 aa, Homo sapiens
PEIAS

SEQ ID NO: 13110 - protein, 5 aa, Homo sapiens
LSPAG

SEQ ID NO: 13111 - protein, 5 aa, Homo sapiens
QMKDQ

SEQ ID NO: 13112 - protein, 5 aa, Homo sapiens
PDECV

SEQ ID NO: 13113 - protein, 5 aa, Homo sapiens
GVWIA

SEQ ID NO: 13114 - protein, 5 aa, Homo sapiens
GIRAW

SEQ ID NO: 13115 - protein, 5 aa, Homo sapiens
EFEAM

SEQ ID NO: 13116 - protein, 5 aa, Homo sapiens
RFAPY

SEQ ID NO: 13117 - protein, 5 aa, Homo sapiens
DNGWE

SEQ ID NO: 13118 - protein, 5 aa, Homo sapiens
LFSMK

SEQ ID NO: 13119 - protein, 5 aa, Homo sapiens
TQAGS

SEQ ID NO: 13120 - protein, 5 aa, Homo sapiens
GRGQY

SEQ ID NO: 13121 - protein, 5 aa, Homo sapiens
QGDQP

SEQ ID NO: 13122 - protein, 5 aa, Homo sapiens
VMNPV

SEQ ID NO: 13123 - protein, 5 aa, Homo sapiens
TSGWV

SEQ ID NO: 13124 - protein, 5 aa, Homo sapiens
SWGDG

SEQ ID NO: 13125 - protein, 5 aa, Homo sapiens
TAIRS

SEQ ID NO: 13126 - protein, 5 aa, Homo sapiens
LGVNY

SEQ ID NO: 13127 - protein, 5 aa, Homo sapiens
EHTFH

SEQ ID NO: 13128 - protein, 5 aa, Homo sapiens
YTSSK

SEQ ID NO: 13129 - protein, 5 aa, Homo sapiens
VFDAR

SEQ ID NO: 13130 - protein, 5 aa, Homo sapiens
PLVGT

SEQ ID NO: 13131 - protein, 5 aa, Homo sapiens
SSQQA

SEQ ID NO: 13132 - protein, 5 aa, Homo sapiens
CFAME

SEQ ID NO: 13133 - protein, 5 aa, Homo sapiens
QKKDY

SEQ ID NO: 13134 - protein, 5 aa, Homo sapiens
YLLSQ

SEQ ID NO: 13135 - protein, 5 aa, Homo sapiens
HLECR

SEQ ID NO: 13136 - protein, 5 aa, Homo sapiens
SIPDA

SEQ ID NO: 13137 - protein, 5 aa, Homo sapiens
HKELH

SEQ ID NO: 13138 - protein, 5 aa, Homo sapiens
SNVAS

SEQ ID NO: 13139 - protein, 5 aa, Homo sapiens
NRDFD

SEQ ID NO: 13140 - protein, 5 aa, Homo sapiens
RREGS

SEQ ID NO: 13141 - protein, 5 aa, Homo sapiens
LEKQN

SEQ ID NO: 13142 - protein, 5 aa, Homo sapiens
RMHNR

SEQ ID NO: 13143 - protein, 5 aa, Homo sapiens
EQRAE

SEQ ID NO: 13144 - protein, 5 aa, Homo sapiens
SLFSD

SEQ ID NO: 13145 - protein, 5 aa, Homo sapiens
VMFSA

SEQ ID NO: 13146 - protein, 5 aa, Homo sapiens
QNSDH

SEQ ID NO: 13147 - protein, 5 aa, Homo sapiens
FREEL

SEQ ID NO: 13148 - protein, 5 aa, Homo sapiens
GPGTA

SEQ ID NO: 13149 - protein, 5 aa, Homo sapiens
LLTKK

SEQ ID NO: 13150 - protein, 5 aa, Homo sapiens
GYSLT

SEQ ID NO: 13151 - protein, 5 aa, Homo sapiens
IIMFI

SEQ ID NO: 13152 - protein, 5 aa, Homo sapiens
DCGLF

SEQ ID NO: 13153 - protein, 5 aa, Homo sapiens
YEKND

SEQ ID NO: 13154 - protein, 5 aa, Homo sapiens
EATAV

SEQ ID NO: 13155 - protein, 5 aa, Homo sapiens
DDDDE

SEQ ID NO: 13156 - protein, 5 aa, Homo sapiens
EDLEQ

SEQ ID NO: 13157 - protein, 5 aa, Homo sapiens
FTEME

SEQ ID NO: 13158 - protein, 5 aa, Homo sapiens
VIRKG

SEQ ID NO: 13159 - protein, 5 aa, Homo sapiens
PRRRR

SEQ ID NO: 13160 - protein, 5 aa, Homo sapiens
SPLTK

SEQ ID NO: 13161 - protein, 5 aa, Homo sapiens
MKHDV

SEQ ID NO: 13162 - protein, 5 aa, Homo sapiens
IPSTL

SEQ ID NO: 13163 - protein, 5 aa, Homo sapiens
QERPM

SEQ ID NO: 13164 - protein, 5 aa, Homo sapiens
PGPRA

SEQ ID NO: 13165 - protein, 5 aa, Homo sapiens
ADTPD

SEQ ID NO: 13166 - protein, 5 aa, Homo sapiens
LFGEK

SEQ ID NO: 13167 - protein, 5 aa, Homo sapiens
HPGYR

SEQ ID NO: 13168 - protein, 5 aa, Homo sapiens
KRIHT

SEQ ID NO: 13169 - protein, 5 aa, Homo sapiens
EPIDV

SEQ ID NO: 13170 - protein, 5 aa, Homo sapiens
STVTL

SEQ ID NO: 13171 - protein, 5 aa, Homo sapiens
SNEAP

SEQ ID NO: 13172 - protein, 5 aa, Homo sapiens
QPAAQ

SEQ ID NO: 13173 - protein, 5 aa, Homo sapiens
PAVTL

SEQ ID NO: 13174 - protein, 5 aa, Homo sapiens
QLISV

SEQ ID NO: 13175 - protein, 5 aa, Homo sapiens
EDGED

SEQ ID NO: 13176 - protein, 5 aa, Homo sapiens
EWHYL

SEQ ID NO: 13177 - protein, 5 aa, Homo sapiens
TVRGG

SEQ ID NO: 13178 - protein, 5 aa, Homo sapiens
KHKVT

SEQ ID NO: 13179 - protein, 5 aa, Homo sapiens
EQANQ

SEQ ID NO: 13180 - protein, 5 aa, Homo sapiens
GFQQS

SEQ ID NO: 13181 - protein, 5 aa, Homo sapiens
KLNPS

SEQ ID NO: 13182 - protein, 5 aa, Homo sapiens
EALLK

SEQ ID NO: 13183 - protein, 5 aa, Homo sapiens
RQGSS

SEQ ID NO: 13184 - protein, 5 aa, Homo sapiens
GIAQV

SEQ ID NO: 13185 - protein, 5 aa, Homo sapiens
PERKD

SEQ ID NO: 13186 - protein, 5 aa, Homo sapiens
SLRVA

SEQ ID NO: 13187 - protein, 5 aa, Homo sapiens
DFLRW

SEQ ID NO: 13188 - protein, 5 aa, Homo sapiens
HRSLL

SEQ ID NO: 13189 - protein, 5 aa, Homo sapiens
MMISM

SEQ ID NO: 13190 - protein, 5 aa, Homo sapiens
LTTSH

SEQ ID NO: 13191 - protein, 5 aa, Homo sapiens
IEICV

SEQ ID NO: 13192 - protein, 5 aa, Homo sapiens
VETLQ

SEQ ID NO: 13193 - protein, 5 aa, Homo sapiens
IISRN

SEQ ID NO: 13194 - protein, 5 aa, Homo sapiens
GQRNH

SEQ ID NO: 13195 - protein, 5 aa, Homo sapiens
SSWSL

SEQ ID NO: 13196 - protein, 5 aa, Homo sapiens
ETLET

SEQ ID NO: 13197 - protein, 5 aa, Homo sapiens
AKLYF

SEQ ID NO: 13198 - protein, 5 aa, Homo sapiens
DRKDP

SEQ ID NO: 13199 - protein, 5 aa, Homo sapiens
YGFGG

SEQ ID NO: 13200 - protein, 5 aa, Homo sapiens
NYTHP

SEQ ID NO: 13201 - protein, 5 aa, Homo sapiens
MPVLC

SEQ ID NO: 13202 - protein, 5 aa, Homo sapiens
PVGGL

SEQ ID NO: 13203 - protein, 5 aa, Homo sapiens
PQPTD

SEQ ID NO: 13204 - protein, 5 aa, Homo sapiens
STRRR

SEQ ID NO: 13205 - protein, 5 aa, Homo sapiens
DCPPV

SEQ ID NO: 13206 - protein, 5 aa, Homo sapiens
VAGGC

SEQ ID NO: 13207 - protein, 5 aa, Homo sapiens
IVHTL

SEQ ID NO: 13208 - protein, 5 aa, Homo sapiens
TPKNT

SEQ ID NO: 13209 - protein, 5 aa, Homo sapiens
GLAQL

SEQ ID NO: 13210 - protein, 5 aa, Homo sapiens
MATEE

SEQ ID NO: 13211 - protein, 5 aa, Homo sapiens
LYEVM

SEQ ID NO: 13212 - protein, 5 aa, Homo sapiens
FGTTV

SEQ ID NO: 13213 - protein, 5 aa, Homo sapiens
LGGVS

SEQ ID NO: 13214 - protein, 5 aa, Homo sapiens
TDSEH

SEQ ID NO: 13215 - protein, 5 aa, Homo sapiens
AALKV

SEQ ID NO: 13216 - protein, 5 aa, Homo sapiens
KTFWS

SEQ ID NO: 13217 - protein, 5 aa, Homo sapiens
TRKPP

SEQ ID NO: 13218 - protein, 5 aa, Homo sapiens
QVYNV

SEQ ID NO: 13219 - protein, 5 aa, Homo sapiens
GTQSH

SEQ ID NO: 13220 - protein, 5 aa, Homo sapiens
DPIAV

SEQ ID NO: 13221 - protein, 5 aa, Homo sapiens
LQRSP

SEQ ID NO: 13222 - protein, 5 aa, Homo sapiens
ERTAQ

SEQ ID NO: 13223 - protein, 5 aa, Homo sapiens
DADGD

SEQ ID NO: 13224 - protein, 5 aa, Homo sapiens
NSEML

SEQ ID NO: 13225 - protein, 5 aa, Homo sapiens
IQAGL

SEQ ID NO: 13226 - protein, 5 aa, Homo sapiens
FHLVR

SEQ ID NO: 13227 - protein, 5 aa, Homo sapiens
KTADD

SEQ ID NO: 13228 - protein, 5 aa, Homo sapiens
EYGKT

SEQ ID NO: 13229 - protein, 5 aa, Homo sapiens
RFSSP

SEQ ID NO: 13230 - protein, 5 aa, Homo sapiens
ESGVQ

SEQ ID NO: 13231 - protein, 5 aa, Homo sapiens
DKKEE

SEQ ID NO: 13232 - protein, 5 aa, Homo sapiens
IPKKK

SEQ ID NO: 13233 - protein, 5 aa, Homo sapiens
FVHYH

SEQ ID NO: 13234 - protein, 5 aa, Homo sapiens
HPPVL

SEQ ID NO: 13235 - protein, 5 aa, Homo sapiens
TWSCV

SEQ ID NO: 13236 - protein, 5 aa, Homo sapiens
VWRPY

SEQ ID NO: 13237 - protein, 5 aa, Homo sapiens
CSIIV

SEQ ID NO: 13238 - protein, 5 aa, Homo sapiens
KVVSS

SEQ ID NO: 13239 - protein, 5 aa, Homo sapiens
LRRQS

SEQ ID NO: 13240 - protein, 5 aa, Homo sapiens
KAAAM

SEQ ID NO: 13241 - protein, 5 aa, Homo sapiens
EQGRR

SEQ ID NO: 13242 - protein, 5 aa, Homo sapiens
PVMQA

SEQ ID NO: 13243 - protein, 5 aa, Homo sapiens
VVSCP

SEQ ID NO: 13244 - protein, 5 aa, Homo sapiens
PPVRV

SEQ ID NO: 13245 - protein, 5 aa, Homo sapiens
FPPGF

SEQ ID NO: 13246 - protein, 5 aa, Homo sapiens
TVLSQ

SEQ ID NO: 13247 - protein, 5 aa, Homo sapiens
FYKKL

SEQ ID NO: 13248 - protein, 5 aa, Homo sapiens
VVLGT

SEQ ID NO: 13249 - protein, 5 aa, Homo sapiens
CHPDT

SEQ ID NO: 13250 - protein, 5 aa, Homo sapiens
VKVDL

SEQ ID NO: 13251 - protein, 5 aa, Homo sapiens
KKHKE

SEQ ID NO: 13252 - protein, 5 aa, Homo sapiens
HFAFL

SEQ ID NO: 13253 - protein, 5 aa, Homo sapiens
SRHRL

SEQ ID NO: 13254 - protein, 5 aa, Homo sapiens
HLWKI

SEQ ID NO: 13255 - protein, 5 aa, Homo sapiens
VPKKP

SEQ ID NO: 13256 - protein, 5 aa, Homo sapiens
IHNVT

SEQ ID NO: 13257 - protein, 5 aa, Homo sapiens
EEKLN

SEQ ID NO: 13258 - protein, 5 aa, Homo sapiens
RAKDE

SEQ ID NO: 13259 - protein, 5 aa, Homo sapiens
VAIVA

SEQ ID NO: 13260 - protein, 5 aa, Homo sapiens
KQRKK

SEQ ID NO: 13261 - protein, 5 aa, Homo sapiens
VPDDE

SEQ ID NO: 13262 - protein, 5 aa, Homo sapiens
IPGEL

SEQ ID NO: 13263 - protein, 5 aa, Homo sapiens
FRSEL

SEQ ID NO: 13264 - protein, 5 aa, Homo sapiens
IEPRV

SEQ ID NO: 13265 - protein, 5 aa, Homo sapiens
GIFRM

SEQ ID NO: 13266 - protein, 5 aa, Homo sapiens
PYVKT

SEQ ID NO: 13267 - protein, 5 aa, Homo sapiens
GMSED

SEQ ID NO: 13268 - protein, 5 aa, Homo sapiens
TKLPG

SEQ ID NO: 13269 - protein, 5 aa, Homo sapiens
KKQYV

SEQ ID NO: 13270 - protein, 5 aa, Homo sapiens
RRDLR

SEQ ID NO: 13271 - protein, 5 aa, Homo sapiens
LVSIT

SEQ ID NO: 13272 - protein, 5 aa, Homo sapiens
ITSLS

SEQ ID NO: 13273 - protein, 5 aa, Homo sapiens
FSLSS

SEQ ID NO: 13274 - protein, 5 aa, Homo sapiens
EGFQL

SEQ ID NO: 13275 - protein, 5 aa, Homo sapiens
GYSAP

SEQ ID NO: 13276 - protein, 5 aa, Homo sapiens
APQES

SEQ ID NO: 13277 - protein, 5 aa, Homo sapiens
AEEAA

SEQ ID NO: 13278 - protein, 5 aa, Homo sapiens
PDRMQ

SEQ ID NO: 13279 - protein, 5 aa, Homo sapiens
GRDAL

SEQ ID NO: 13280 - protein, 5 aa, Homo sapiens
MDTGR

SEQ ID NO: 13281 - protein, 5 aa, Homo sapiens
WTPYM

SEQ ID NO: 13282 - protein, 5 aa, Homo sapiens
GCYIS

SEQ ID NO: 13283 - protein, 5 aa, Homo sapiens
PGSRE

SEQ ID NO: 13284 - protein, 5 aa, Homo sapiens
QVPNS

SEQ ID NO: 13285 - protein, 5 aa, Homo sapiens
GSEQL

SEQ ID NO: 13286 - protein, 5 aa, Homo sapiens
LVQHQ

SEQ ID NO: 13287 - protein, 5 aa, Homo sapiens
VQESV

SEQ ID NO: 13288 - protein, 5 aa, Homo sapiens
VIFPQ

SEQ ID NO: 13289 - protein, 5 aa, Homo sapiens
LWTLS

SEQ ID NO: 13290 - protein, 5 aa, Homo sapiens
SDSER

SEQ ID NO: 13291 - protein, 5 aa, Homo sapiens
VILQF

SEQ ID NO: 13292 - protein, 5 aa, Homo sapiens
SWGVS

SEQ ID NO: 13293 - protein, 5 aa, Homo sapiens
QGKPS

SEQ ID NO: 13294 - protein, 5 aa, Homo sapiens
VRKQA

SEQ ID NO: 13295 - protein, 5 aa, Homo sapiens
KPLQP

SEQ ID NO: 13296 - protein, 5 aa, Homo sapiens
KQEVI

SEQ ID NO: 13297 - protein, 5 aa, Homo sapiens
GSKKD

SEQ ID NO: 13298 - protein, 5 aa, Homo sapiens
SRPGS

SEQ ID NO: 13299 - protein, 5 aa, Homo sapiens
KFQVL

SEQ ID NO: 13300 - protein, 5 aa, Homo sapiens
IRAER

SEQ ID NO: 13301 - protein, 5 aa, Homo sapiens
VKPNV

SEQ ID NO: 13302 - protein, 5 aa, Homo sapiens
QPAEP

SEQ ID NO: 13303 - protein, 5 aa, Homo sapiens
PSPSS

SEQ ID NO: 13304 - protein, 5 aa, Homo sapiens
QKKAV

SEQ ID NO: 13305 - protein, 5 aa, Homo sapiens
HKKET

SEQ ID NO: 13306 - protein, 5 aa, Homo sapiens
QDSDS

SEQ ID NO: 13307 - protein, 5 aa, Homo sapiens
LPETT

SEQ ID NO: 13308 - protein, 5 aa, Homo sapiens
LLDLP

SEQ ID NO: 13309 - protein, 5 aa, Homo sapiens
LQKLG

SEQ ID NO: 13310 - protein, 5 aa, Homo sapiens
VALIQ

SEQ ID NO: 13311 - protein, 5 aa, Homo sapiens
PEFVV

SEQ ID NO: 13312 - protein, 5 aa, Homo sapiens
QNDGD

SEQ ID NO: 13313 - protein, 5 aa, Homo sapiens
QSVVI

SEQ ID NO: 13314 - protein, 5 aa, Homo sapiens
NPQSQ

SEQ ID NO: 13315 - protein, 5 aa, Homo sapiens
SSTSL

SEQ ID NO: 13316 - protein, 5 aa, Homo sapiens
LSFKQ

SEQ ID NO: 13317 - protein, 5 aa, Homo sapiens
TEPNS

SEQ ID NO: 13318 - protein, 5 aa, Homo sapiens
EGDVL

SEQ ID NO: 13319 - protein, 5 aa, Homo sapiens
KRRRY

SEQ ID NO: 13320 - protein, 5 aa, Homo sapiens
YCVLQ

SEQ ID NO: 13321 - protein, 5 aa, Homo sapiens
IPRLP

SEQ ID NO: 13322 - protein, 5 aa, Homo sapiens
LVGFC

SEQ ID NO: 13323 - protein, 5 aa, Homo sapiens
DADDH

SEQ ID NO: 13324 - protein, 5 aa, Homo sapiens
KGHPL

SEQ ID NO: 13325 - protein, 5 aa, Homo sapiens
SLFDL

SEQ ID NO: 13326 - protein, 5 aa, Homo sapiens
SSEGK

SEQ ID NO: 13327 - protein, 5 aa, Homo sapiens
GLGAS

SEQ ID NO: 13328 - protein, 5 aa, Homo sapiens
SNSAV

SEQ ID NO: 13329 - protein, 5 aa, Homo sapiens
YLADC

SEQ ID NO: 13330 - protein, 5 aa, Homo sapiens
KGFTQ

SEQ ID NO: 13331 - protein, 5 aa, Homo sapiens
MMPDN

SEQ ID NO: 13332 - protein, 5 aa, Homo sapiens
ETVPV

SEQ ID NO: 13333 - protein, 5 aa, Homo sapiens
FYLTP

SEQ ID NO: 13334 - protein, 5 aa, Homo sapiens
NTRWK

SEQ ID NO: 13335 - protein, 5 aa, Homo sapiens
PQRLY

SEQ ID NO: 13336 - protein, 5 aa, Homo sapiens
VPKKP

SEQ ID NO: 13337 - protein, 5 aa, Homo sapiens
DIEAR

SEQ ID NO: 13338 - protein, 5 aa, Homo sapiens
SLAHL

SEQ ID NO: 13339 - protein, 5 aa, Homo sapiens
VYPIV

SEQ ID NO: 13340 - protein, 5 aa, Homo sapiens
EELLY

SEQ ID NO: 13341 - protein, 5 aa, Homo sapiens
LVCNT

SEQ ID NO: 13342 - protein, 5 aa, Homo sapiens
SSSDE

SEQ ID NO: 13343 - protein, 5 aa, Homo sapiens
GSIPT

SEQ ID NO: 13344 - protein, 5 aa, Homo sapiens
CVAHS

SEQ ID NO: 13345 - protein, 5 aa, Homo sapiens
ELPSV

SEQ ID NO: 13346 - protein, 5 aa, Homo sapiens
KSSGH

SEQ ID NO: 13347 - protein, 5 aa, Homo sapiens
HGGNH

SEQ ID NO: 13348 - protein, 5 aa, Homo sapiens
MWESL

SEQ ID NO: 13349 - protein, 5 aa, Homo sapiens
QCYSN

SEQ ID NO: 13350 - protein, 5 aa, Homo sapiens
SNHSI

SEQ ID NO: 13351 - protein, 5 aa, Homo sapiens
FSPLK

SEQ ID NO: 13352 - protein, 5 aa, Homo sapiens
RIKQS

SEQ ID NO: 13353 - protein, 5 aa, Homo sapiens
VHHVA

SEQ ID NO: 13354 - protein, 5 aa, Homo sapiens
VEDST

SEQ ID NO: 13355 - protein, 5 aa, Homo sapiens
SSVNK

SEQ ID NO: 13356 - protein, 5 aa, Homo sapiens
YVSHL

SEQ ID NO: 13357 - protein, 5 aa, Homo sapiens
EASPA

SEQ ID NO: 13358 - protein, 5 aa, Homo sapiens
RQYNY

SEQ ID NO: 13359 - protein, 5 aa, Homo sapiens
TAVVI

SEQ ID NO: 13360 - protein, 5 aa, Homo sapiens
IKVTN

SEQ ID NO: 13361 - protein, 5 aa, Homo sapiens
DAAVQ

SEQ ID NO: 13362 - protein, 5 aa, Homo sapiens
KTPSV

SEQ ID NO: 13363 - protein, 5 aa, Homo sapiens
QPQAL

SEQ ID NO: 13364 - protein, 5 aa, Homo sapiens
LGPEA

SEQ ID NO: 13365 - protein, 5 aa, Homo sapiens
CWRYR

SEQ ID NO: 13366 - protein, 5 aa, Homo sapiens
RVQWG

SEQ ID NO: 13367 - protein, 5 aa, Homo sapiens
ITIVG

SEQ ID NO: 13368 - protein, 5 aa, Homo sapiens
PVADL

SEQ ID NO: 13369 - protein, 5 aa, Homo sapiens
RNRCR

SEQ ID NO: 13370 - protein, 5 aa, Homo sapiens
KRPVD

SEQ ID NO: 13371 - protein, 5 aa, Homo sapiens
AVDER

SEQ ID NO: 13372 - protein, 5 aa, Homo sapiens
RLWQQ

SEQ ID NO: 13373 - protein, 5 aa, Homo sapiens
AELKN

SEQ ID NO: 13374 - protein, 5 aa, Homo sapiens
KTPSQ

SEQ ID NO: 13375 - protein, 5 aa, Homo sapiens
GPHVL

SEQ ID NO: 13376 - protein, 5 aa, Homo sapiens
SLKFS

SEQ ID NO: 13377 - protein, 5 aa, Homo sapiens
RAYGW

SEQ ID NO: 13378 - protein, 5 aa, Homo sapiens
LDDSW

SEQ ID NO: 13379 - protein, 5 aa, Homo sapiens
SQATG

SEQ ID NO: 13380 - protein, 5 aa, Homo sapiens
CRRIS

SEQ ID NO: 13381 - protein, 5 aa, Homo sapiens
QEAEK

SEQ ID NO: 13382 - protein, 5 aa, Homo sapiens
QAQRS

SEQ ID NO: 13383 - protein, 5 aa, Homo sapiens
SPASD

SEQ ID NO: 13384 - protein, 5 aa, Homo sapiens
FAAAL

SEQ ID NO: 13385 - protein, 5 aa, Homo sapiens
GTLQS

SEQ ID NO: 13386 - protein, 5 aa, Homo sapiens
NESAA

SEQ ID NO: 13387 - protein, 5 aa, Homo sapiens
SGAVL

SEQ ID NO: 13388 - protein, 5 aa, Homo sapiens
TCSLL

SEQ ID NO: 13389 - protein, 5 aa, Homo sapiens
LTLTL

SEQ ID NO: 13390 - protein, 5 aa, Homo sapiens
RARLS

SEQ ID NO: 13391 - protein, 5 aa, Homo sapiens
LRRLC

SEQ ID NO: 13392 - protein, 5 aa, Homo sapiens
SDNDF

SEQ ID NO: 13393 - protein, 5 aa, Homo sapiens
GAPRF

SEQ ID NO: 13394 - protein, 5 aa, Homo sapiens
SQNVQ

SEQ ID NO: 13395 - protein, 5 aa, Homo sapiens
NNKNT

SEQ ID NO: 13396 - protein, 5 aa, Homo sapiens
PSLTH

SEQ ID NO: 13397 - protein, 5 aa, Homo sapiens
HQDEH

SEQ ID NO: 13398 - protein, 5 aa, Homo sapiens
QGKHE

SEQ ID NO: 13399 - protein, 5 aa, Homo sapiens
WREAS

SEQ ID NO: 13400 - protein, 5 aa, Homo sapiens
LLKEA

SEQ ID NO: 13401 - protein, 5 aa, Homo sapiens
YSGPP

SEQ ID NO: 13402 - protein, 5 aa, Homo sapiens
PLTDY

SEQ ID NO: 13403 - protein, 5 aa, Homo sapiens
QALLT

SEQ ID NO: 13404 - protein, 5 aa, Homo sapiens
EGTIL

SEQ ID NO: 13405 - protein, 5 aa, Homo sapiens
KRTFL

SEQ ID NO: 13406 - protein, 5 aa, Homo sapiens
FDTDL

SEQ ID NO: 13407 - protein, 5 aa, Homo sapiens
KQIMN

SEQ ID NO: 13408 - protein, 5 aa, Homo sapiens
EEFYA

SEQ ID NO: 13409 - protein, 5 aa, Homo sapiens
DTLPF

SEQ ID NO: 13410 - protein, 5 aa, Homo sapiens
VHFLT

SEQ ID NO: 13411 - protein, 5 aa, Homo sapiens
VHPSP

SEQ ID NO: 13412 - protein, 5 aa, Homo sapiens
YQSLR

SEQ ID NO: 13413 - protein, 5 aa, Homo sapiens
AGKKK

SEQ ID NO: 13414 - protein, 5 aa, Homo sapiens
KLYVD

SEQ ID NO: 13415 - protein, 5 aa, Homo sapiens
GAGEQ

SEQ ID NO: 13416 - protein, 5 aa, Homo sapiens
LEENS

SEQ ID NO: 13417 - protein, 5 aa, Homo sapiens
PQPAP

SEQ ID NO: 13418 - protein, 5 aa, Homo sapiens
SQDGA

SEQ ID NO: 13419 - protein, 5 aa, Homo sapiens
EQSPR

SEQ ID NO: 13420 - protein, 5 aa, Homo sapiens
LKLHM

SEQ ID NO: 13421 - protein, 5 aa, Homo sapiens
TPLQM

SEQ ID NO: 13422 - protein, 5 aa, Homo sapiens
VDGTD

SEQ ID NO: 13423 - protein, 5 aa, Homo sapiens
TEDLD

SEQ ID NO: 13424 - protein, 5 aa, Homo sapiens
RIHTG

SEQ ID NO: 13425 - protein, 5 aa, Homo sapiens
RLYHD

SEQ ID NO: 13426 - protein, 5 aa, Homo sapiens
PCHTH

SEQ ID NO: 13427 - protein, 5 aa, Homo sapiens
RPPEL

SEQ ID NO: 13428 - protein, 5 aa, Homo sapiens
LSEES

SEQ ID NO: 13429 - protein, 5 aa, Homo sapiens
HILSD

SEQ ID NO: 13430 - protein, 5 aa, Homo sapiens
MLAPH

SEQ ID NO: 13431 - protein, 5 aa, Homo sapiens
FKYVM

SEQ ID NO: 13432 - protein, 5 aa, Homo sapiens
QLQPP

SEQ ID NO: 13433 - protein, 5 aa, Homo sapiens
GQRQL

SEQ ID NO: 13434 - protein, 5 aa, Homo sapiens
YNDKP

SEQ ID NO: 13435 - protein, 5 aa, Homo sapiens
PEMVP

SEQ ID NO: 13436 - protein, 5 aa, Homo sapiens
LQYFK

SEQ ID NO: 13437 - protein, 5 aa, Homo sapiens
PFKEQ

SEQ ID NO: 13438 - protein, 5 aa, Homo sapiens
GSSGE

SEQ ID NO: 13439 - protein, 5 aa, Homo sapiens
QSGGD

SEQ ID NO: 13440 - protein, 5 aa, Homo sapiens
NQYIK

SEQ ID NO: 13441 - protein, 5 aa, Homo sapiens
FFEEL

SEQ ID NO: 13442 - protein, 5 aa, Homo sapiens
TERNS

SEQ ID NO: 13443 - protein, 5 aa, Homo sapiens
PGPGA

SEQ ID NO: 13444 - protein, 5 aa, Homo sapiens
MGTSL

SEQ ID NO: 13445 - protein, 5 aa, Homo sapiens
RFTPY

SEQ ID NO: 13446 - protein, 5 aa, Homo sapiens
SEEKA

SEQ ID NO: 13447 - protein, 5 aa, Homo sapiens
RNHTL

SEQ ID NO: 13448 - protein, 5 aa, Homo sapiens
PGHVD

SEQ ID NO: 13449 - protein, 5 aa, Homo sapiens
YCVLQ

SEQ ID NO: 13450 - protein, 5 aa, Homo sapiens
ITDLR

SEQ ID NO: 13451 - protein, 5 aa, Homo sapiens
PQNIK

SEQ ID NO: 13452 - protein, 5 aa, Homo sapiens
DLNEM

SEQ ID NO: 13453 - protein, 5 aa, Homo sapiens
QKSYR

SEQ ID NO: 13454 - protein, 5 aa, Homo sapiens
RFDSQ

SEQ ID NO: 13455 - protein, 5 aa, Homo sapiens
PSSKP

SEQ ID NO: 13456 - protein, 5 aa, Homo sapiens
QHNLK

SEQ ID NO: 13457 - protein, 5 aa, Homo sapiens
DSPST

SEQ ID NO: 13458 - protein, 5 aa, Homo sapiens
VGKLD

SEQ ID NO: 13459 - protein, 5 aa, Homo sapiens
DFHRA

SEQ ID NO: 13460 - protein, 5 aa, Homo sapiens
DTFDS

SEQ ID NO: 13461 - protein, 5 aa, Homo sapiens
CPVSI

SEQ ID NO: 13462 - protein, 5 aa, Homo sapiens
QHCSQ

SEQ ID NO: 13463 - protein, 5 aa, Homo sapiens
QGDQQ

SEQ ID NO: 13464 - protein, 5 aa, Homo sapiens
QAPAC

SEQ ID NO: 13465 - protein, 5 aa, Homo sapiens
KIRKK

SEQ ID NO: 13466 - protein, 5 aa, Homo sapiens
TKSLE

SEQ ID NO: 13467 - protein, 5 aa, Homo sapiens
KCGSL

SEQ ID NO: 13468 - protein, 5 aa, Homo sapiens
EYLHL

SEQ ID NO: 13469 - protein, 5 aa, Homo sapiens
RRQQY

SEQ ID NO: 13470 - protein, 5 aa, Homo sapiens
TEIAG

SEQ ID NO: 13471 - protein, 5 aa, Homo sapiens
LYATD

SEQ ID NO: 13472 - protein, 5 aa, Homo sapiens
KSKEL

SEQ ID NO: 13473 - protein, 5 aa, Homo sapiens
LSHCV

SEQ ID NO: 13474 - protein, 5 aa, Homo sapiens
GSSRR

SEQ ID NO: 13475 - protein, 5 aa, Homo sapiens
HVLYP

SEQ ID NO: 13476 - protein, 5 aa, Homo sapiens
CRSGE

SEQ ID NO: 13477 - protein, 5 aa, Homo sapiens
FSAAS

SEQ ID NO: 13478 - protein, 5 aa, Homo sapiens
HCCVQ

SEQ ID NO: 13479 - protein, 5 aa, Homo sapiens
KTEYT

SEQ ID NO: 13480 - protein, 5 aa, Homo sapiens
SKDTL

SEQ ID NO: 13481 - protein, 5 aa, Homo sapiens
GSLKP

SEQ ID NO: 13482 - protein, 5 aa, Homo sapiens
DLKLG

SEQ ID NO: 13483 - protein, 5 aa, Homo sapiens
CDIDI

SEQ ID NO: 13484 - protein, 5 aa, Homo sapiens
LSRNK

SEQ ID NO: 13485 - protein, 5 aa, Homo sapiens
YNGGQ

SEQ ID NO: 13486 - protein, 5 aa, Homo sapiens
NVLLK

SEQ ID NO: 13487 - protein, 5 aa, Homo sapiens
ESSEI

SEQ ID NO: 13488 - protein, 5 aa, Homo sapiens
PDKPF

SEQ ID NO: 13489 - protein, 5 aa, Homo sapiens
TSDIW

SEQ ID NO: 13490 - protein, 5 aa, Homo sapiens
VKSRV

SEQ ID NO: 13491 - protein, 5 aa, Homo sapiens
PLSHI

SEQ ID NO: 13492 - protein, 5 aa, Homo sapiens
EEEPE

SEQ ID NO: 13493 - protein, 5 aa, Homo sapiens
CPLGA

SEQ ID NO: 13494 - protein, 5 aa, Homo sapiens
RMDRL

SEQ ID NO: 13495 - protein, 5 aa, Homo sapiens
FPPGF

SEQ ID NO: 13496 - protein, 5 aa, Homo sapiens
IISRN

SEQ ID NO: 13497 - protein, 5 aa, Homo sapiens
DFGLC

SEQ ID NO: 13498 - protein, 5 aa, Homo sapiens
ASEED

SEQ ID NO: 13499 - protein, 5 aa, Homo sapiens
GLAYS

SEQ ID NO: 13500 - protein, 5 aa, Homo sapiens
LCLKK

SEQ ID NO: 13501 - protein, 5 aa, Homo sapiens
VAKDV

SEQ ID NO: 13502 - protein, 5 aa, Homo sapiens
EEAGQ

SEQ ID NO: 13503 - protein, 5 aa, Homo sapiens
HVKLK

SEQ ID NO: 13504 - protein, 5 aa, Homo sapiens
NCIIS

SEQ ID NO: 13505 - protein, 5 aa, Homo sapiens
KCVVS

SEQ ID NO: 13506 - protein, 5 aa, Homo sapiens
LVHSE

SEQ ID NO: 13507 - protein, 5 aa, Homo sapiens
LRPFF

SEQ ID NO: 13508 - protein, 5 aa, Homo sapiens
EKRLY

SEQ ID NO: 13509 - protein, 5 aa, Homo sapiens
ALLWD

SEQ ID NO: 13510 - protein, 5 aa, Homo sapiens
ESEGP

SEQ ID NO: 13511 - protein, 5 aa, Homo sapiens
NEWVS

SEQ ID NO: 13512 - protein, 5 aa, Homo sapiens
LESSP

SEQ ID NO: 13513 - protein, 5 aa, Homo sapiens
DGGDM

SEQ ID NO: 13514 - protein, 5 aa, Homo sapiens
GAFKN

SEQ ID NO: 13515 - protein, 5 aa, Homo sapiens
YGRTW

SEQ ID NO: 13516 - protein, 5 aa, Homo sapiens
SSEGK

SEQ ID NO: 13517 - protein, 5 aa, Homo sapiens
KTKQP

SEQ ID NO: 13518 - protein, 5 aa, Homo sapiens
EMLLP

SEQ ID NO: 13519 - protein, 5 aa, Homo sapiens
SGKKA

SEQ ID NO: 13520 - protein, 5 aa, Homo sapiens
HSPDL

SEQ ID NO: 13521 - protein, 5 aa, Homo sapiens
YLEHC

SEQ ID NO: 13522 - protein, 5 aa, Homo sapiens
KTVEE

SEQ ID NO: 13523 - protein, 5 aa, Homo sapiens
CPKLS

SEQ ID NO: 13524 - protein, 5 aa, Homo sapiens
TLAIH

SEQ ID NO: 13525 - protein, 5 aa, Homo sapiens
TEDDT

SEQ ID NO: 13526 - protein, 5 aa, Homo sapiens
QLLDR

SEQ ID NO: 13527 - protein, 5 aa, Homo sapiens
GSQPS

SEQ ID NO: 13528 - protein, 5 aa, Homo sapiens
GRGQA

SEQ ID NO: 13529 - protein, 5 aa, Homo sapiens
ATVVS

SEQ ID NO: 13530 - protein, 5 aa, Homo sapiens
QHSQW

SEQ ID NO: 13531 - protein, 5 aa, Homo sapiens
PRRRR

SEQ ID NO: 13532 - protein, 5 aa, Homo sapiens
EFYVD

SEQ ID NO: 13533 - protein, 5 aa, Homo sapiens
QVSPH

SEQ ID NO: 13534 - protein, 5 aa, Homo sapiens
KTKDL

SEQ ID NO: 13535 - protein, 5 aa, Homo sapiens
ELNCI

SEQ ID NO: 13536 - protein, 5 aa, Homo sapiens
EVKFQ

SEQ ID NO: 13537 - protein, 5 aa, Homo sapiens
EIADE

SEQ ID NO: 13538 - protein, 5 aa, Homo sapiens
DEAEV

SEQ ID NO: 13539 - protein, 5 aa, Homo sapiens
GEARR

SEQ ID NO: 13540 - protein, 5 aa, Homo sapiens
SCQLL

SEQ ID NO: 13541 - protein, 5 aa, Homo sapiens
FLRRL

SEQ ID NO: 13542 - protein, 5 aa, Homo sapiens
LEKYA

SEQ ID NO: 13543 - protein, 5 aa, Homo sapiens
CLACV

SEQ ID NO: 13544 - protein, 5 aa, Homo sapiens
FALPL

SEQ ID NO: 13545 - protein, 5 aa, Homo sapiens
YVEKN

SEQ ID NO: 13546 - protein, 5 aa, Homo sapiens
YGPKP

SEQ ID NO: 13547 - protein, 5 aa, Homo sapiens
TPKKD

SEQ ID NO: 13548 - protein, 5 aa, Homo sapiens
ASPAH

SEQ ID NO: 13549 - protein, 5 aa, Homo sapiens
VCMPV

SEQ ID NO: 13550 - protein, 5 aa, Homo sapiens
SYPTV

SEQ ID NO: 13551 - protein, 5 aa, Homo sapiens
EDTHL

SEQ ID NO: 13552 - protein, 5 aa, Homo sapiens
FNIVS

SEQ ID NO: 13553 - protein, 5 aa, Homo sapiens
KCHVM

SEQ ID NO: 13554 - protein, 5 aa, Homo sapiens
LPESL

SEQ ID NO: 13555 - protein, 5 aa, Homo sapiens
YPQQV

SEQ ID NO: 13556 - protein, 5 aa, Homo sapiens
PASCS

SEQ ID NO: 13557 - protein, 5 aa, Homo sapiens
QPIWQ

SEQ ID NO: 13558 - protein, 5 aa, Homo sapiens
EEAAR

SEQ ID NO: 13559 - protein, 5 aa, Homo sapiens
RDRHH

SEQ ID NO: 13560 - protein, 5 aa, Homo sapiens
EEGGS

SEQ ID NO: 13561 - protein, 5 aa, Homo sapiens
PAMRF

SEQ ID NO: 13562 - protein, 5 aa, Homo sapiens
PGLSY

SEQ ID NO: 13563 - protein, 5 aa, Homo sapiens
DAMLE

SEQ ID NO: 13564 - protein, 5 aa, Homo sapiens
GIRFL

SEQ ID NO: 13565 - protein, 5 aa, Homo sapiens
PGVLT

SEQ ID NO: 13566 - protein, 5 aa, Homo sapiens
VPDTW

SEQ ID NO: 13567 - protein, 5 aa, Homo sapiens
KVDWG

SEQ ID NO: 13568 - protein, 5 aa, Homo sapiens
IMQKN

SEQ ID NO: 13569 - protein, 5 aa, Homo sapiens
HETIV

SEQ ID NO: 13570 - protein, 5 aa, Homo sapiens
TLLTR

SEQ ID NO: 13571 - protein, 5 aa, Homo sapiens
EYFFT

SEQ ID NO: 13572 - protein, 5 aa, Homo sapiens
FSSAK

SEQ ID NO: 13573 - protein, 5 aa, Homo sapiens
VYRGN

SEQ ID NO: 13574 - protein, 5 aa, Homo sapiens
EGNEH

SEQ ID NO: 13575 - protein, 5 aa, Homo sapiens
RRKAL

SEQ ID NO: 13576 - protein, 5 aa, Homo sapiens
RFGRR

SEQ ID NO: 13577 - protein, 5 aa, Homo sapiens
GFNIQ

SEQ ID NO: 13578 - protein, 5 aa, Homo sapiens
QYTPL

SEQ ID NO: 13579 - protein, 5 aa, Homo sapiens
KSGVW

SEQ ID NO: 13580 - protein, 5 aa, Homo sapiens
WKSLQ

SEQ ID NO: 13581 - protein, 5 aa, Homo sapiens
INDAS

SEQ ID NO: 13582 - protein, 5 aa, Homo sapiens
FDGVD

SEQ ID NO: 13583 - protein, 5 aa, Homo sapiens
ESTAC

SEQ ID NO: 13584 - protein, 5 aa, Homo sapiens
GASSG

SEQ ID NO: 13585 - protein, 5 aa, Homo sapiens
AASCL

SEQ ID NO: 13586 - protein, 5 aa, Homo sapiens
TPLDF

SEQ ID NO: 13587 - protein, 5 aa, Homo sapiens
ASLHG

SEQ ID NO: 13588 - protein, 5 aa, Homo sapiens
TAIRS

SEQ ID NO: 13589 - protein, 5 aa, Homo sapiens
WMGGQ

SEQ ID NO: 13590 - protein, 5 aa, Homo sapiens
TKDKA

SEQ ID NO: 13591 - protein, 5 aa, Homo sapiens
QGMSQ

SEQ ID NO: 13592 - protein, 5 aa, Homo sapiens
SGLTK

SEQ ID NO: 13593 - protein, 5 aa, Homo sapiens
LGARV

SEQ ID NO: 13594 - protein, 5 aa, Homo sapiens
GKFIL

SEQ ID NO: 13595 - protein, 5 aa, Homo sapiens
ASFRA

SEQ ID NO: 13596 - protein, 5 aa, Homo sapiens
RSVVI

SEQ ID NO: 13597 - protein, 5 aa, Homo sapiens
VTAMG

SEQ ID NO: 13598 - protein, 5 aa, Homo sapiens
QCCSN

SEQ ID NO: 13599 - protein, 5 aa, Homo sapiens
RAHLS

SEQ ID NO: 13600 - protein, 5 aa, Homo sapiens
IIRVS

SEQ ID NO: 13601 - protein, 5 aa, Homo sapiens
CDVSS

SEQ ID NO: 13602 - protein, 5 aa, Homo sapiens
PDSLS

SEQ ID NO: 13603 - protein, 5 aa, Homo sapiens
EKDDK

SEQ ID NO: 13604 - protein, 5 aa, Homo sapiens
YYYDD

SEQ ID NO: 13605 - protein, 5 aa, Homo sapiens
TTNED

SEQ ID NO: 13606 - protein, 5 aa, Homo sapiens
LFFFG

SEQ ID NO: 13607 - protein, 5 aa, Homo sapiens
AKEKL

SEQ ID NO: 13608 - protein, 5 aa, Homo sapiens
VQTVV

SEQ ID NO: 13609 - protein, 5 aa, Homo sapiens
HGARR

SEQ ID NO: 13610 - protein, 5 aa, Homo sapiens
VQKEN

SEQ ID NO: 13611 - protein, 5 aa, Homo sapiens
GEAAV

SEQ ID NO: 13612 - protein, 5 aa, Homo sapiens
SSKQR

SEQ ID NO: 13613 - protein, 5 aa, Homo sapiens
AWATW

SEQ ID NO: 13614 - protein, 5 aa, Homo sapiens
NPTHL

SEQ ID NO: 13615 - protein, 5 aa, Homo sapiens
NRRRR

SEQ ID NO: 13616 - protein, 5 aa, Homo sapiens
HSRLG

SEQ ID NO: 13617 - protein, 5 aa, Homo sapiens
CKKER

SEQ ID NO: 13618 - protein, 5 aa, Homo sapiens
SLPSS

SEQ ID NO: 13619 - protein, 5 aa, Homo sapiens
SIFGR

SEQ ID NO: 13620 - protein, 5 aa, Homo sapiens
EIQKI

SEQ ID NO: 13621 - protein, 5 aa, Homo sapiens
ELNTK

SEQ ID NO: 13622 - protein, 5 aa, Homo sapiens
PLPWD

SEQ ID NO: 13623 - protein, 5 aa, Homo sapiens
EGEDD

SEQ ID NO: 13624 - protein, 5 aa, Homo sapiens
RIGFF

SEQ ID NO: 13625 - protein, 5 aa, Homo sapiens
ELAPT

SEQ ID NO: 13626 - protein, 5 aa, Homo sapiens
FSLKF

SEQ ID NO: 13627 - protein, 5 aa, Homo sapiens
AGGYP

SEQ ID NO: 13628 - protein, 5 aa, Homo sapiens
CGPVP

SEQ ID NO: 13629 - protein, 5 aa, Homo sapiens
VETKF

SEQ ID NO: 13630 - protein, 5 aa, Homo sapiens
LVSLV

SEQ ID NO: 13631 - protein, 5 aa, Homo sapiens
LSDID

SEQ ID NO: 13632 - protein, 5 aa, Homo sapiens
EKKDA

SEQ ID NO: 13633 - protein, 5 aa, Homo sapiens
HSTGR

SEQ ID NO: 13634 - protein, 5 aa, Homo sapiens
VKLVK

SEQ ID NO: 13635 - protein, 5 aa, Homo sapiens
KLWFL

SEQ ID NO: 13636 - protein, 5 aa, Homo sapiens
GKKLR

SEQ ID NO: 13637 - protein, 5 aa, Homo sapiens
TYVNV

SEQ ID NO: 13638 - protein, 5 aa, Homo sapiens
QSWSP

SEQ ID NO: 13639 - protein, 5 aa, Homo sapiens
LLGSL

SEQ ID NO: 13640 - protein, 5 aa, Homo sapiens
QVVPL

SEQ ID NO: 13641 - protein, 5 aa, Homo sapiens
MESTV

SEQ ID NO: 13642 - protein, 5 aa, Homo sapiens
FLLRL

SEQ ID NO: 13643 - protein, 5 aa, Homo sapiens
KEEGA

SEQ ID NO: 13644 - protein, 5 aa, Homo sapiens
QVIQF

SEQ ID NO: 13645 - protein, 5 aa, Homo sapiens
CVLVA

SEQ ID NO: 13646 - protein, 5 aa, Homo sapiens
RDLQA

SEQ ID NO: 13647 - protein, 5 aa, Homo sapiens
QQADE

SEQ ID NO: 13648 - protein, 5 aa, Homo sapiens
YEFMA

SEQ ID NO: 13649 - protein, 5 aa, Homo sapiens
CGGDD

SEQ ID NO: 13650 - protein, 5 aa, Homo sapiens
FGLFD

SEQ ID NO: 13651 - protein, 5 aa, Homo sapiens
AGSIA

SEQ ID NO: 13652 - protein, 5 aa, Homo sapiens
PRGPV

SEQ ID NO: 13653 - protein, 5 aa, Homo sapiens
PRGPV

SEQ ID NO: 13654 - protein, 5 aa, Homo sapiens
RRRLS

SEQ ID NO: 13655 - protein, 5 aa, Homo sapiens
VQESV

SEQ ID NO: 13656 - protein, 5 aa, Homo sapiens
AEHVK

SEQ ID NO: 13657 - protein, 5 aa, Homo sapiens
IRQLN

SEQ ID NO: 13658 - protein, 5 aa, Homo sapiens
EVMEI

SEQ ID NO: 13659 - protein, 5 aa, Homo sapiens
TTDWS

SEQ ID NO: 13660 - protein, 5 aa, Homo sapiens
SESED

SEQ ID NO: 13661 - protein, 5 aa, Homo sapiens
TPPCT

SEQ ID NO: 13662 - protein, 5 aa, Homo sapiens
EEDED

SEQ ID NO: 13663 - protein, 5 aa, Homo sapiens
SLYSL

SEQ ID NO: 13664 - protein, 5 aa, Homo sapiens
LPHYF

SEQ ID NO: 13665 - protein, 5 aa, Homo sapiens
ITIYS

SEQ ID NO: 13666 - protein, 5 aa, Homo sapiens
QQPPR

SEQ ID NO: 13667 - protein, 5 aa, Homo sapiens
KAFGQ

SEQ ID NO: 13668 - protein, 5 aa, Homo sapiens
PLSLP

SEQ ID NO: 13669 - protein, 5 aa, Homo sapiens
SPCWF

SEQ ID NO: 13670 - protein, 5 aa, Homo sapiens
QSEST

SEQ ID NO: 13671 - protein, 5 aa, Homo sapiens
RWTVS

SEQ ID NO: 13672 - protein, 5 aa, Homo sapiens
LFYDV

SEQ ID NO: 13673 - protein, 5 aa, Homo sapiens
LPPAP

SEQ ID NO: 13674 - protein, 5 aa, Homo sapiens
LGCCL

SEQ ID NO: 13675 - protein, 5 aa, Homo sapiens
RSCLL

SEQ ID NO: 13676 - protein, 5 aa, Homo sapiens
KILAQ

SEQ ID NO: 13677 - protein, 5 aa, Homo sapiens
SAASR

SEQ ID NO: 13678 - protein, 5 aa, Homo sapiens
SILIH

SEQ ID NO: 13679 - protein, 5 aa, Homo sapiens
VAYTG

SEQ ID NO: 13680 - protein, 5 aa, Homo sapiens
QENSS

SEQ ID NO: 13681 - protein, 5 aa, Homo sapiens
FWDPE

SEQ ID NO: 13682 - protein, 5 aa, Homo sapiens
EIGRI

SEQ ID NO: 13683 - protein, 5 aa, Homo sapiens
GQVGG

SEQ ID NO: 13684 - protein, 5 aa, Homo sapiens
HVLQK

SEQ ID NO: 13685 - protein, 5 aa, Homo sapiens
ESPRH

SEQ ID NO: 13686 - protein, 5 aa, Homo sapiens
GISPS

SEQ ID NO: 13687 - protein, 5 aa, Homo sapiens
KKKPP

SEQ ID NO: 13688 - protein, 5 aa, Homo sapiens
ADAPE

SEQ ID NO: 13689 - protein, 5 aa, Homo sapiens
SCCLA

SEQ ID NO: 13690 - protein, 5 aa, Homo sapiens
SAESE

SEQ ID NO: 13691 - protein, 5 aa, Homo sapiens
RYKVL

SEQ ID NO: 13692 - protein, 5 aa, Homo sapiens
VWVEP

SEQ ID NO: 13693 - protein, 5 aa, Homo sapiens
DDWES

SEQ ID NO: 13694 - protein, 5 aa, Homo sapiens
FVIKV

SEQ ID NO: 13695 - protein, 5 aa, Homo sapiens
LFHYR

SEQ ID NO: 13696 - protein, 5 aa, Homo sapiens
AEYTD

SEQ ID NO: 13697 - protein, 5 aa, Homo sapiens
GHRVS

SEQ ID NO: 13698 - protein, 5 aa, Homo sapiens
LLPAP

SEQ ID NO: 13699 - protein, 5 aa, Homo sapiens
RKATR

SEQ ID NO: 13700 - protein, 5 aa, Homo sapiens
KASSQ

SEQ ID NO: 13701 - protein, 5 aa, Homo sapiens
DRVSF

SEQ ID NO: 13702 - protein, 5 aa, Homo sapiens
PRHAR

SEQ ID NO: 13703 - protein, 5 aa, Homo sapiens
TETNA

SEQ ID NO: 13704 - protein, 5 aa, Homo sapiens
QPRKK

SEQ ID NO: 13705 - protein, 5 aa, Homo sapiens
ADPVA

SEQ ID NO: 13706 - protein, 5 aa, Homo sapiens
PDENE

SEQ ID NO: 13707 - protein, 5 aa, Homo sapiens
DSVLF

SEQ ID NO: 13708 - protein, 5 aa, Homo sapiens
NVQDT

SEQ ID NO: 13709 - protein, 5 aa, Homo sapiens
RDDQL

SEQ ID NO: 13710 - protein, 5 aa, Homo sapiens
SPPLS

SEQ ID NO: 13711 - protein, 5 aa, Homo sapiens
YGFGG

SEQ ID NO: 13712 - protein, 5 aa, Homo sapiens
VVSPR

SEQ ID NO: 13713 - protein, 5 aa, Homo sapiens
TDEDD

SEQ ID NO: 13714 - protein, 5 aa, Homo sapiens
ATPEA

SEQ ID NO: 13715 - protein, 5 aa, Homo sapiens
LLLED

SEQ ID NO: 13716 - protein, 5 aa, Homo sapiens
AFLEN

SEQ ID NO: 13717 - protein, 5 aa, Homo sapiens
PGEAK

SEQ ID NO: 13718 - protein, 5 aa, Homo sapiens
HRGGH

SEQ ID NO: 13719 - protein, 5 aa, Homo sapiens
NTHLI

SEQ ID NO: 13720 - protein, 5 aa, Homo sapiens
WFGMQ

SEQ ID NO: 13721 - protein, 5 aa, Homo sapiens
CPTPH

SEQ ID NO: 13722 - protein, 5 aa, Homo sapiens
LLHMP

SEQ ID NO: 13723 - protein, 5 aa, Homo sapiens
NLLTL

SEQ ID NO: 13724 - protein, 5 aa, Homo sapiens
KRRPD

SEQ ID NO: 13725 - protein, 5 aa, Homo sapiens
LRVIS

SEQ ID NO: 13726 - protein, 5 aa, Homo sapiens
SIGRD

SEQ ID NO: 13727 - protein, 5 aa, Homo sapiens
FENVI

SEQ ID NO: 13728 - protein, 5 aa, Homo sapiens
DDLDI

SEQ ID NO: 13729 - protein, 5 aa, Homo sapiens
DHKDH

SEQ ID NO: 13730 - protein, 5 aa, Homo sapiens
ARAQT

SEQ ID NO: 13731 - protein, 5 aa, Homo sapiens
DDETI

SEQ ID NO: 13732 - protein, 5 aa, Homo sapiens
GPPPV

SEQ ID NO: 13733 - protein, 5 aa, Homo sapiens
APGED

SEQ ID NO: 13734 - protein, 5 aa, Homo sapiens
VLGLS

SEQ ID NO: 13735 - protein, 5 aa, Homo sapiens
LAHKA

SEQ ID NO: 13736 - protein, 5 aa, Homo sapiens
DSDLE

SEQ ID NO: 13737 - protein, 5 aa, Homo sapiens
AQAPA

SEQ ID NO: 13738 - protein, 5 aa, Homo sapiens
DEAYD

SEQ ID NO: 13739 - protein, 5 aa, Homo sapiens
HQKAL

SEQ ID NO: 13740 - protein, 5 aa, Homo sapiens
RLKPT

SEQ ID NO: 13741 - protein, 5 aa, Homo sapiens
APGED

SEQ ID NO: 13742 - protein, 5 aa, Homo sapiens
NSALT

SEQ ID NO: 13743 - protein, 5 aa, Homo sapiens
PVCFL

SEQ ID NO: 13744 - protein, 5 aa, Homo sapiens
AGQEM

SEQ ID NO: 13745 - protein, 5 aa, Homo sapiens
GEAQV

SEQ ID NO: 13746 - protein, 5 aa, Homo sapiens
RESKC

SEQ ID NO: 13747 - protein, 5 aa, Homo sapiens
LLGNP

SEQ ID NO: 13748 - protein, 5 aa, Homo sapiens
PRKQG

SEQ ID NO: 13749 - protein, 5 aa, Homo sapiens
STDYV

SEQ ID NO: 13750 - protein, 5 aa, Homo sapiens
QADHW

SEQ ID NO: 13751 - protein, 5 aa, Homo sapiens
CGGED

SEQ ID NO: 13752 - protein, 5 aa, Homo sapiens
LLLPH

SEQ ID NO: 13753 - protein, 5 aa, Homo sapiens
KGWCV

SEQ ID NO: 13754 - protein, 5 aa, Homo sapiens
KSSRK

SEQ ID NO: 13755 - protein, 5 aa, Homo sapiens
AIRSY

SEQ ID NO: 13756 - protein, 5 aa, Homo sapiens
RRRLS

SEQ ID NO: 13757 - protein, 5 aa, Homo sapiens
VKVSY

SEQ ID NO: 13758 - protein, 5 aa, Homo sapiens
IDSIF

SEQ ID NO: 13759 - protein, 5 aa, Homo sapiens
RGHCG

SEQ ID NO: 13760 - protein, 5 aa, Homo sapiens
GKIRD

SEQ ID NO: 13761 - protein, 5 aa, Homo sapiens
TTDWS

SEQ ID NO: 13762 - protein, 5 aa, Homo sapiens
TAQNG

SEQ ID NO: 13763 - protein, 5 aa, Homo sapiens
KASQD

SEQ ID NO: 13764 - protein, 5 aa, Homo sapiens
AGPRK

SEQ ID NO: 13765 - protein, 5 aa, Homo sapiens
AHPAP

SEQ ID NO: 13766 - protein, 5 aa, Homo sapiens
FKRCS

SEQ ID NO: 13767 - protein, 5 aa, Homo sapiens
SEWEL

SEQ ID NO: 13768 - protein, 5 aa, Homo sapiens
RRNIF

SEQ ID NO: 13769 - protein, 5 aa, Homo sapiens
CAVPR

SEQ ID NO: 13770 - protein, 5 aa, Homo sapiens
SKNSE

SEQ ID NO: 13771 - protein, 5 aa, Homo sapiens
QPTTE

SEQ ID NO: 13772 - protein, 5 aa, Homo sapiens
AQKEN

SEQ ID NO: 13773 - protein, 5 aa, Homo sapiens
AIHQR

SEQ ID NO: 13774 - protein, 5 aa, Homo sapiens
KILYE

SEQ ID NO: 13775 - protein, 5 aa, Homo sapiens
KQKGL

SEQ ID NO: 13776 - protein, 5 aa, Homo sapiens
VVGWN

SEQ ID NO: 13777 - protein, 5 aa, Homo sapiens
ASQSA

SEQ ID NO: 13778 - protein, 5 aa, Homo sapiens
PPGPK

SEQ ID NO: 13779 - protein, 5 aa, Homo sapiens
HFVMC

SEQ ID NO: 13780 - protein, 5 aa, Homo sapiens
FPPGF

SEQ ID NO: 13781 - protein, 5 aa, Homo sapiens
NKKAQ

SEQ ID NO: 13782 - protein, 5 aa, Homo sapiens
ASRFW

SEQ ID NO: 13783 - protein, 5 aa, Homo sapiens
GAGPR

SEQ ID NO: 13784 - protein, 5 aa, Homo sapiens
ALQVF

SEQ ID NO: 13785 - protein, 5 aa, Homo sapiens
RGSQC

SEQ ID NO: 13786 - protein, 5 aa, Homo sapiens
HLEES

SEQ ID NO: 13787 - protein, 5 aa, Homo sapiens
FGYSR

SEQ ID NO: 13788 - protein, 5 aa, Homo sapiens
VGPLI

SEQ ID NO: 13789 - protein, 5 aa, Homo sapiens
KKLGK

SEQ ID NO: 13790 - protein, 5 aa, Homo sapiens
KVFMY

SEQ ID NO: 13791 - protein, 5 aa, Homo sapiens
SCSSR

SEQ ID NO: 13792 - protein, 5 aa, Homo sapiens
ELKDQ

SEQ ID NO: 13793 - protein, 5 aa, Homo sapiens
MSNFS

SEQ ID NO: 13794 - protein, 5 aa, Homo sapiens
QPGAS

SEQ ID NO: 13795 - protein, 5 aa, Homo sapiens
SRLLV

SEQ ID NO: 13796 - protein, 5 aa, Homo sapiens
THSHT

SEQ ID NO: 13797 - protein, 5 aa, Homo sapiens
FGFNF

SEQ ID NO: 13798 - protein, 5 aa, Homo sapiens
RRIQQ

SEQ ID NO: 13799 - protein, 5 aa, Homo sapiens
DRPDF

SEQ ID NO: 13800 - protein, 5 aa, Homo sapiens
LCNFM

SEQ ID NO: 13801 - protein, 5 aa, Homo sapiens
ELPSQ

SEQ ID NO: 13802 - protein, 5 aa, Homo sapiens
TLEYS

SEQ ID NO: 13803 - protein, 5 aa, Homo sapiens
SKFGS

SEQ ID NO: 13804 - protein, 5 aa, Homo sapiens
FLRPR

SEQ ID NO: 13805 - protein, 5 aa, Homo sapiens
VESAF

SEQ ID NO: 13806 - protein, 5 aa, Homo sapiens
AASGI

SEQ ID NO: 13807 - protein, 5 aa, Homo sapiens
FTMGR

SEQ ID NO: 13808 - protein, 5 aa, Homo sapiens
EDSRE

SEQ ID NO: 13809 - protein, 5 aa, Homo sapiens
PDPLT

SEQ ID NO: 13810 - protein, 5 aa, Homo sapiens
RLYHL

SEQ ID NO: 13811 - protein, 5 aa, Homo sapiens
HVFKS

SEQ ID NO: 13812 - protein, 5 aa, Homo sapiens
QTTRS

SEQ ID NO: 13813 - protein, 5 aa, Homo sapiens
STMRY

SEQ ID NO: 13814 - protein, 5 aa, Homo sapiens
YGRTW

SEQ ID NO: 13815 - protein, 5 aa, Homo sapiens
TEKDN

SEQ ID NO: 13816 - protein, 5 aa, Homo sapiens
HKIVK

SEQ ID NO: 13817 - protein, 5 aa, Homo sapiens
FCCWI

SEQ ID NO: 13818 - protein, 5 aa, Homo sapiens
FLIFL

SEQ ID NO: 13819 - protein, 5 aa, Homo sapiens
KNASC

SEQ ID NO: 13820 - protein, 5 aa, Homo sapiens
KPARR

SEQ ID NO: 13821 - protein, 5 aa, Homo sapiens
FIGVG

SEQ ID NO: 13822 - protein, 5 aa, Homo sapiens
LVMFI

SEQ ID NO: 13823 - protein, 5 aa, Homo sapiens
MEKDI

SEQ ID NO: 13824 - protein, 5 aa, Homo sapiens
LEILF

SEQ ID NO: 13825 - protein, 5 aa, Homo sapiens
DLDLN

SEQ ID NO: 13826 - protein, 5 aa, Homo sapiens
KEAPH

SEQ ID NO: 13827 - protein, 5 aa, Homo sapiens
PNTQD

SEQ ID NO: 13828 - protein, 5 aa, Homo sapiens
GRKSP

SEQ ID NO: 13829 - protein, 5 aa, Homo sapiens
SLFVD

SEQ ID NO: 13830 - protein, 5 aa, Homo sapiens
EKIHF

SEQ ID NO: 13831 - protein, 5 aa, Homo sapiens
RTVSK

SEQ ID NO: 13832 - protein, 5 aa, Homo sapiens
LLSTS

SEQ ID NO: 13833 - protein, 5 aa, Homo sapiens
TCGAK

SEQ ID NO: 13834 - protein, 5 aa, Homo sapiens
LMGWE

SEQ ID NO: 13835 - protein, 5 aa, Homo sapiens
IVKTT

SEQ ID NO: 13836 - protein, 5 aa, Homo sapiens
NSRGL

SEQ ID NO: 13837 - protein, 5 aa, Homo sapiens
NSFMV

SEQ ID NO: 13838 - protein, 5 aa, Homo sapiens
PPIGN

SEQ ID NO: 13839 - protein, 5 aa, Homo sapiens
TCNRH

SEQ ID NO: 13840 - protein, 5 aa, Homo sapiens
TEKYR

SEQ ID NO: 13841 - protein, 5 aa, Homo sapiens
RGYLN

SEQ ID NO: 13842 - protein, 5 aa, Homo sapiens
LFLIY

SEQ ID NO: 13843 - protein, 5 aa, Homo sapiens
EAGEI

SEQ ID NO: 13844 - protein, 5 aa, Homo sapiens
ISYRQ

SEQ ID NO: 13845 - protein, 5 aa, Homo sapiens
RQQNF

SEQ ID NO: 13846 - protein, 5 aa, Homo sapiens
PGQSQ

SEQ ID NO: 13847 - protein, 5 aa, Homo sapiens
AIHSY

SEQ ID NO: 13848 - protein, 5 aa, Homo sapiens
TNIFA

SEQ ID NO: 13849 - protein, 5 aa, Homo sapiens
PQRSR

SEQ ID NO: 13850 - protein, 5 aa, Homo sapiens
TGTQR

SEQ ID NO: 13851 - protein, 5 aa, Homo sapiens
SLIEI

SEQ ID NO: 13852 - protein, 5 aa, Homo sapiens
HILHS

SEQ ID NO: 13853 - protein, 5 aa, Homo sapiens
FSNIK

SEQ ID NO: 13854 - protein, 5 aa, Homo sapiens
QAKRN

SEQ ID NO: 13855 - protein, 5 aa, Homo sapiens
TKGEV

SEQ ID NO: 13856 - protein, 5 aa, Homo sapiens
LMARE

SEQ ID NO: 13857 - protein, 5 aa, Homo sapiens
KSKTK

SEQ ID NO: 13858 - protein, 5 aa, Homo sapiens
SEITE

SEQ ID NO: 13859 - protein, 5 aa, Homo sapiens
QVPRK

SEQ ID NO: 13860 - protein, 5 aa, Homo sapiens
HIMSG

SEQ ID NO: 13861 - protein, 5 aa, Homo sapiens
LASVG

SEQ ID NO: 13862 - protein, 5 aa, Homo sapiens
CGVGS

SEQ ID NO: 13863 - protein, 5 aa, Homo sapiens
LANSS

SEQ ID NO: 13864 - protein, 5 aa, Homo sapiens
AAKKD

SEQ ID NO: 13865 - protein, 5 aa, Homo sapiens
CKKAI

SEQ ID NO: 13866 - protein, 5 aa, Homo sapiens
AGGCI

SEQ ID NO: 13867 - protein, 5 aa, Homo sapiens
LNSTF

SEQ ID NO: 13868 - protein, 5 aa, Homo sapiens
DESWD

SEQ ID NO: 13869 - protein, 5 aa, Homo sapiens
AENNS

SEQ ID NO: 13870 - protein, 5 aa, Homo sapiens
LPRGC

SEQ ID NO: 13871 - protein, 5 aa, Homo sapiens
AENEF

SEQ ID NO: 13872 - protein, 5 aa, Homo sapiens
VPSDL

SEQ ID NO: 13873 - protein, 5 aa, Homo sapiens
YEVIY

SEQ ID NO: 13874 - protein, 5 aa, Homo sapiens
DHYAT

SEQ ID NO: 13875 - protein, 5 aa, Homo sapiens
GTEVA

SEQ ID NO: 13876 - protein, 5 aa, Homo sapiens
PVVCQ

SEQ ID NO: 13877 - protein, 5 aa, Homo sapiens
NHESI

SEQ ID NO: 13878 - protein, 5 aa, Homo sapiens
HLGRH

SEQ ID NO: 13879 - protein, 5 aa, Homo sapiens
KETLV

SEQ ID NO: 13880 - protein, 5 aa, Homo sapiens
TGEVA

SEQ ID NO: 13881 - protein, 5 aa, Homo sapiens
IKIIN

SEQ ID NO: 13882 - protein, 5 aa, Homo sapiens
QGTCV

SEQ ID NO: 13883 - protein, 5 aa, Homo sapiens
SEKLC

SEQ ID NO: 13884 - protein, 5 aa, Homo sapiens
CASWQ

SEQ ID NO: 13885 - protein, 5 aa, Homo sapiens
CYRDF

SEQ ID NO: 13886 - protein, 5 aa, Homo sapiens
CGGDD

SEQ ID NO: 13887 - protein, 5 aa, Homo sapiens
YGFGG

SEQ ID NO: 13888 - protein, 5 aa, Homo sapiens
FEIEL

SEQ ID NO: 13889 - protein, 5 aa, Homo sapiens
GTSAS

SEQ ID NO: 13890 - protein, 5 aa, Homo sapiens
SNLTR

SEQ ID NO: 13891 - protein, 5 aa, Homo sapiens
KVTTC

SEQ ID NO: 13892 - protein, 5 aa, Homo sapiens
RKTDD

SEQ ID NO: 13893 - protein, 5 aa, Homo sapiens
AMDSI

SEQ ID NO: 13894 - protein, 5 aa, Homo sapiens
GLTAL

SEQ ID NO: 13895 - protein, 5 aa, Homo sapiens
KTQAV

SEQ ID NO: 13896 - protein, 5 aa, Homo sapiens
KSCTM

SEQ ID NO: 13897 - protein, 5 aa, Homo sapiens
TDTLC

SEQ ID NO: 13898 - protein, 5 aa, Homo sapiens
VLFWK

SEQ ID NO: 13899 - protein, 5 aa, Homo sapiens
DQCCC

SEQ ID NO: 13900 - protein, 5 aa, Homo sapiens
LPSTI

SEQ ID NO: 13901 - protein, 5 aa, Homo sapiens
LLSQT

SEQ ID NO: 13902 - protein, 5 aa, Homo sapiens
LIISY

SEQ ID NO: 13903 - protein, 5 aa, Homo sapiens
SYAFS

SEQ ID NO: 13904 - protein, 5 aa, Homo sapiens
RIHTG

SEQ ID NO: 13905 - protein, 5 aa, Homo sapiens
DISNI

SEQ ID NO: 13906 - protein, 5 aa, Homo sapiens
VHSGE

SEQ ID NO: 13907 - protein, 5 aa, Homo sapiens
IAKTQ

SEQ ID NO: 13908 - protein, 5 aa, Homo sapiens
AARPV

SEQ ID NO: 13909 - protein, 5 aa, Homo sapiens
LQELE

SEQ ID NO: 13910 - protein, 5 aa, Homo sapiens
SSAEE

SEQ ID NO: 13911 - protein, 5 aa, Homo sapiens
PLPSQ

SEQ ID NO: 13912 - protein, 5 aa, Homo sapiens
SPRKP

SEQ ID NO: 13913 - protein, 5 aa, Homo sapiens
LSASS

SEQ ID NO: 13914 - protein, 5 aa, Homo sapiens
ELEYL

SEQ ID NO: 13915 - protein, 5 aa, Homo sapiens
WAICP

SEQ ID NO: 13916 - protein, 5 aa, Homo sapiens
LHIRS

SEQ ID NO: 13917 - protein, 5 aa, Homo sapiens
GTLLN

SEQ ID NO: 13918 - protein, 5 aa, Homo sapiens
NLLLL

SEQ ID NO: 13919 - protein, 5 aa, Homo sapiens
RCQAA

SEQ ID NO: 13920 - protein, 5 aa, Homo sapiens
WKTVW

SEQ ID NO: 13921 - protein, 5 aa, Homo sapiens
KKKDK

SEQ ID NO: 13922 - protein, 5 aa, Homo sapiens
SLHGH

SEQ ID NO: 13923 - protein, 5 aa, Homo sapiens
SAGSS

SEQ ID NO: 13924 - protein, 5 aa, Homo sapiens
AFSEL

SEQ ID NO: 13925 - protein, 5 aa, Homo sapiens
DKAEL

SEQ ID NO: 13926 - protein, 5 aa, Homo sapiens
NKLGV

SEQ ID NO: 13927 - protein, 5 aa, Homo sapiens
LGHEV

SEQ ID NO: 13928 - protein, 5 aa, Homo sapiens
WWTSN

SEQ ID NO: 13929 - protein, 5 aa, Homo sapiens
EGEGV

SEQ ID NO: 13930 - protein, 5 aa, Homo sapiens
ALDDD

SEQ ID NO: 13931 - protein, 5 aa, Homo sapiens
TGTQR

SEQ ID NO: 13932 - protein, 5 aa, Homo sapiens
DRQKT

SEQ ID NO: 13933 - protein, 5 aa, Homo sapiens
YVQFT

SEQ ID NO: 13934 - protein, 5 aa, Homo sapiens
PSRGA

SEQ ID NO: 13935 - protein, 5 aa, Homo sapiens
FQVRT

SEQ ID NO: 13936 - protein, 5 aa, Homo sapiens
RCQLW

SEQ ID NO: 13937 - protein, 5 aa, Homo sapiens
TLAKC

SEQ ID NO: 13938 - protein, 5 aa, Homo sapiens
VKRNV

SEQ ID NO: 13939 - protein, 5 aa, Homo sapiens
CIMNW

SEQ ID NO: 13940 - protein, 5 aa, Homo sapiens
FSVKM

SEQ ID NO: 13941 - protein, 5 aa, Homo sapiens
SLSKC

SEQ ID NO: 13942 - protein, 5 aa, Homo sapiens
WNIRR

SEQ ID NO: 13943 - protein, 5 aa, Homo sapiens
APKTN

SEQ ID NO: 13944 - protein, 5 aa, Homo sapiens
LVQLC

SEQ ID NO: 13945 - protein, 5 aa, Homo sapiens
YFHRK

SEQ ID NO: 13946 - protein, 5 aa, Homo sapiens
QGKPG

SEQ ID NO: 13947 - protein, 5 aa, Homo sapiens
LSKVN

SEQ ID NO: 13948 - protein, 5 aa, Homo sapiens
NMKMI

SEQ ID NO: 13949 - protein, 5 aa, Homo sapiens
HGGVL

SEQ ID NO: 13950 - protein, 5 aa, Homo sapiens
SSLLD

SEQ ID NO: 13951 - protein, 5 aa, Homo sapiens
ACFMG

SEQ ID NO: 13952 - protein, 5 aa, Homo sapiens
VVPPM

SEQ ID NO: 13953 - protein, 5 aa, Homo sapiens
KENNN

SEQ ID NO: 13954 - protein, 5 aa, Homo sapiens
FSQDP

SEQ ID NO: 13955 - protein, 5 aa, Homo sapiens
KILHC

SEQ ID NO: 13956 - protein, 5 aa, Homo sapiens
SMHRR

SEQ ID NO: 13957 - protein, 5 aa, Homo sapiens
TEEGD

SEQ ID NO: 13958 - protein, 5 aa, Homo sapiens
SFDFQ

SEQ ID NO: 13959 - protein, 5 aa, Homo sapiens
AGQEH

SEQ ID NO: 13960 - protein, 5 aa, Homo sapiens
VFSIL

SEQ ID NO: 13961 - protein, 5 aa, Homo sapiens
TSEKP

SEQ ID NO: 13962 - protein, 5 aa, Homo sapiens
GLNEE

SEQ ID NO: 13963 - protein, 5 aa, Homo sapiens
PGSKS

SEQ ID NO: 13964 - protein, 5 aa, Homo sapiens
HVHRF

SEQ ID NO: 13965 - protein, 5 aa, Homo sapiens
KKKKK

SEQ ID NO: 13966 - protein, 5 aa, Homo sapiens
SLEVT

SEQ ID NO: 13967 - protein, 5 aa, Homo sapiens
LNHPY

SEQ ID NO: 13968 - protein, 5 aa, Homo sapiens
MHYTD

SEQ ID NO: 13969 - protein, 5 aa, Homo sapiens
NLKTP

SEQ ID NO: 13970 - protein, 5 aa, Homo sapiens
TSPTQ

SEQ ID NO: 13971 - protein, 5 aa, Homo sapiens
PILPQ

SEQ ID NO: 13972 - protein, 5 aa, Homo sapiens
SFLAT

SEQ ID NO: 13973 - protein, 5 aa, Homo sapiens
LTETS

SEQ ID NO: 13974 - protein, 5 aa, Homo sapiens
KKAKQ

SEQ ID NO: 13975 - protein, 5 aa, Homo sapiens
GPFSF

SEQ ID NO: 13976 - protein, 5 aa, Homo sapiens
FVAQH

SEQ ID NO: 13977 - protein, 5 aa, Homo sapiens
AVECR

SEQ ID NO: 13978 - protein, 5 aa, Homo sapiens
LLLSL

SEQ ID NO: 13979 - protein, 5 aa, Homo sapiens
TGEKP

SEQ ID NO: 13980 - protein, 5 aa, Homo sapiens
TSTIF

SEQ ID NO: 13981 - protein, 5 aa, Homo sapiens
GAVQF

SEQ ID NO: 13982 - protein, 5 aa, Homo sapiens
LVFTY

SEQ ID NO: 13983 - protein, 5 aa, Homo sapiens
KRGRK

SEQ ID NO: 13984 - protein, 5 aa, Homo sapiens
EPELA

SEQ ID NO: 13985 - protein, 5 aa, Homo sapiens
FSRLT

SEQ ID NO: 13986 - protein, 5 aa, Homo sapiens
LGMAS

SEQ ID NO: 13987 - protein, 5 aa, Homo sapiens
LPVDH

SEQ ID NO: 13988 - protein, 5 aa, Homo sapiens
DNQRT

SEQ ID NO: 13989 - protein, 5 aa, Homo sapiens
DEDQL

SEQ ID NO: 13990 - protein, 5 aa, Homo sapiens
NLVSL

SEQ ID NO: 13991 - protein, 5 aa, Homo sapiens
FIKQK

SEQ ID NO: 13992 - protein, 5 aa, Homo sapiens
KSWAS

SEQ ID NO: 13993 - protein, 5 aa, Homo sapiens
PGDES

SEQ ID NO: 13994 - protein, 5 aa, Homo sapiens
ALLLL

SEQ ID NO: 13995 - protein, 5 aa, Homo sapiens
PSVCK

SEQ ID NO: 13996 - protein, 5 aa, Homo sapiens
YITLT

SEQ ID NO: 13997 - protein, 5 aa, Homo sapiens
LPGIF

SEQ ID NO: 13998 - protein, 5 aa, Homo sapiens
STEEP

SEQ ID NO: 13999 - protein, 5 aa, Homo sapiens
STCAH

SEQ ID NO: 14000 - protein, 5 aa, Homo sapiens
DLCGK

SEQ ID NO: 14001 - protein, 5 aa, Homo sapiens
FCDNN

SEQ ID NO: 14002 - protein, 5 aa, Homo sapiens
LFPGN

SEQ ID NO: 14003 - protein, 5 aa, Homo sapiens
RAMLQ

SEQ ID NO: 14004 - protein, 5 aa, Homo sapiens
LDSIF

SEQ ID NO: 14005 - protein, 5 aa, Homo sapiens
KAINA

SEQ ID NO: 14006 - protein, 5 aa, Homo sapiens
IWQYA

SEQ ID NO: 14007 - protein, 5 aa, Homo sapiens
LTEHQ

SEQ ID NO: 14008 - protein, 5 aa, Homo sapiens
VLILM

SEQ ID NO: 14009 - protein, 5 aa, Homo sapiens
PRQHP

SEQ ID NO: 14010 - protein, 5 aa, Homo sapiens
SNEDV

SEQ ID NO: 14011 - protein, 5 aa, Homo sapiens
KLTQN

SEQ ID NO: 14012 - protein, 5 aa, Homo sapiens
PLAKT

SEQ ID NO: 14013 - protein, 5 aa, Homo sapiens
MWVKG

SEQ ID NO: 14014 - protein, 5 aa, Homo sapiens
EWKHQ

SEQ ID NO: 14015 - protein, 5 aa, Homo sapiens
SMEEE

SEQ ID NO: 14016 - protein, 5 aa, Homo sapiens
NRKKH

SEQ ID NO: 14017 - protein, 5 aa, Homo sapiens
VLGKL

SEQ ID NO: 14018 - protein, 5 aa, Homo sapiens
VVSCP

SEQ ID NO: 14019 - protein, 5 aa, Homo sapiens
EPMVS

SEQ ID NO: 14020 - protein, 5 aa, Homo sapiens
RPAKV

SEQ ID NO: 14021 - protein, 5 aa, Homo sapiens
MMPTW

SEQ ID NO: 14022 - protein, 5 aa, Homo sapiens
QDMEL

SEQ ID NO: 14023 - protein, 5 aa, Homo sapiens
EGFAE

SEQ ID NO: 14024 - protein, 5 aa, Homo sapiens
YSQEK

SEQ ID NO: 14025 - protein, 5 aa, Homo sapiens
WDSCL

SEQ ID NO: 14026 - protein, 5 aa, Homo sapiens
KIFMS

SEQ ID NO: 14027 - protein, 5 aa, Homo sapiens
TFTFK

SEQ ID NO: 14028 - protein, 5 aa, Homo sapiens
LISIR

SEQ ID NO: 14029 - protein, 5 aa, Homo sapiens
PEKEN

SEQ ID NO: 14030 - protein, 5 aa, Homo sapiens
FDNVI

SEQ ID NO: 14031 - protein, 5 aa, Homo sapiens
LGSVC

SEQ ID NO: 14032 - protein, 5 aa, Homo sapiens
CLLHH

SEQ ID NO: 14033 - protein, 5 aa, Homo sapiens
PSLLD

SEQ ID NO: 14034 - protein, 5 aa, Homo sapiens
RKLAP

SEQ ID NO: 14035 - protein, 5 aa, Homo sapiens
ILEIE

SEQ ID NO: 14036 - protein, 5 aa, Homo sapiens
FPIWR

SEQ ID NO: 14037 - protein, 5 aa, Homo sapiens
EKPYE

SEQ ID NO: 14038 - protein, 5 aa, Homo sapiens
IGWNK

SEQ ID NO: 14039 - protein, 5 aa, Homo sapiens
AGAHH

SEQ ID NO: 14040 - protein, 5 aa, Homo sapiens
YHRGV

SEQ ID NO: 14041 - protein, 5 aa, Homo sapiens
SGKKE

SEQ ID NO: 14042 - protein, 5 aa, Homo sapiens
DDDEE

SEQ ID NO: 14043 - protein, 5 aa, Homo sapiens
LEHQY

SEQ ID NO: 14044 - protein, 5 aa, Homo sapiens
VLFEK

SEQ ID NO: 14045 - protein, 5 aa, Homo sapiens
PGSKD

SEQ ID NO: 14046 - protein, 5 aa, Homo sapiens
RSPNH

SEQ ID NO: 14047 - protein, 5 aa, Homo sapiens
SDKHR

SEQ ID NO: 14048 - protein, 5 aa, Homo sapiens
VVARC

SEQ ID NO: 14049 - protein, 5 aa, Homo sapiens
GEKIA

SEQ ID NO: 14050 - protein, 5 aa, Homo sapiens
RKRKT

SEQ ID NO: 14051 - protein, 5 aa, Homo sapiens
GQYDG

SEQ ID NO: 14052 - protein, 5 aa, Homo sapiens
LRLYT

SEQ ID NO: 14053 - protein, 5 aa, Homo sapiens
KLRQS

SEQ ID NO: 14054 - protein, 5 aa, Homo sapiens
FKDLN

SEQ ID NO: 14055 - protein, 5 aa, Homo sapiens
PPPPT

SEQ ID NO: 14056 - protein, 5 aa, Homo sapiens
HGHRH

SEQ ID NO: 14057 - protein, 5 aa, Homo sapiens
PCEPP

SEQ ID NO: 14058 - protein, 5 aa, Homo sapiens
SFVDF

SEQ ID NO: 14059 - protein, 5 aa, Homo sapiens
FRISP

SEQ ID NO: 14060 - protein, 5 aa, Homo sapiens
ESEQK

SEQ ID NO: 14061 - protein, 5 aa, Homo sapiens
RKFLY

SEQ ID NO: 14062 - protein, 5 aa, Homo sapiens
RAPLP

SEQ ID NO: 14063 - protein, 5 aa, Homo sapiens
EEGWR

SEQ ID NO: 14064 - protein, 5 aa, Homo sapiens
FKSVS

SEQ ID NO: 14065 - protein, 5 aa, Homo sapiens
LFVAL

SEQ ID NO: 14066 - protein, 5 aa, Homo sapiens
KTEKE

SEQ ID NO: 14067 - protein, 5 aa, Homo sapiens
NPTQK

SEQ ID NO: 14068 - protein, 5 aa, Homo sapiens
TVTSS

SEQ ID NO: 14069 - protein, 5 aa, Homo sapiens
LRSSV

SEQ ID NO: 14070 - protein, 5 aa, Homo sapiens
QGFRL

SEQ ID NO: 14071 - protein, 5 aa, Homo sapiens
IQIFV

SEQ ID NO: 14072 - protein, 5 aa, Homo sapiens
PRSAT

SEQ ID NO: 14073 - protein, 5 aa, Homo sapiens
DKFRC

SEQ ID NO: 14074 - protein, 5 aa, Homo sapiens
KPEYC

SEQ ID NO: 14075 - protein, 5 aa, Homo sapiens
SHPRV

SEQ ID NO: 14076 - protein, 5 aa, Homo sapiens
GSPGS

SEQ ID NO: 14077 - protein, 5 aa, Homo sapiens
AFSHV

SEQ ID NO: 14078 - protein, 5 aa, Homo sapiens
RNKQT

SEQ ID NO: 14079 - protein, 5 aa, Homo sapiens
GKSKS

SEQ ID NO: 14080 - protein, 5 aa, Homo sapiens
PYGRY

SEQ ID NO: 14081 - protein, 5 aa, Homo sapiens
LVLQV

SEQ ID NO: 14082 - protein, 5 aa, Homo sapiens
ATKKN

SEQ ID NO: 14083 - protein, 5 aa, Homo sapiens
KKTAP

SEQ ID NO: 14084 - protein, 5 aa, Homo sapiens
HWAWG

SEQ ID NO: 14085 - protein, 5 aa, Homo sapiens
AKGLF

SEQ ID NO: 14086 - protein, 5 aa, Homo sapiens
GSKDD

SEQ ID NO: 14087 - protein, 5 aa, Homo sapiens
ANFDC

SEQ ID NO: 14088 - protein, 5 aa, Homo sapiens
VICVS

SEQ ID NO: 14089 - protein, 5 aa, Homo sapiens
AFGGQ

SEQ ID NO: 14090 - protein, 5 aa, Homo sapiens
EDAMG

SEQ ID NO: 14091 - protein, 5 aa, Homo sapiens
AEAAP

SEQ ID NO: 14092 - protein, 5 aa, Homo sapiens
SGSIP

SEQ ID NO: 14093 - protein, 5 aa, Homo sapiens
SIMIC

SEQ ID NO: 14094 - protein, 5 aa, Homo sapiens
ITSSK

SEQ ID NO: 14095 - protein, 5 aa, Homo sapiens
TIAEN

SEQ ID NO: 14096 - protein, 5 aa, Homo sapiens
SPAHR

SEQ ID NO: 14097 - protein, 5 aa, Homo sapiens
SHSMK

SEQ ID NO: 14098 - protein, 5 aa, Homo sapiens
EDSDS

SEQ ID NO: 14099 - protein, 5 aa, Homo sapiens
RARLS

SEQ ID NO: 14100 - protein, 5 aa, Homo sapiens
SLRPA

SEQ ID NO: 14101 - protein, 5 aa, Homo sapiens
MTAVK

SEQ ID NO: 14102 - protein, 5 aa, Homo sapiens
IICWV

SEQ ID NO: 14103 - protein, 5 aa, Homo sapiens
KVGAR

SEQ ID NO: 14104 - protein, 5 aa, Homo sapiens
QVIQF

SEQ ID NO: 14105 - protein, 5 aa, Homo sapiens
ILFAM

SEQ ID NO: 14106 - protein, 5 aa, Homo sapiens
AFAEK

SEQ ID NO: 14107 - protein, 5 aa, Homo sapiens
VTDRK

SEQ ID NO: 14108 - protein, 5 aa, Homo sapiens
GPTRV

SEQ ID NO: 14109 - protein, 5 aa, Homo sapiens
PDKCV

SEQ ID NO: 14110 - protein, 5 aa, Homo sapiens
DLEEL

SEQ ID NO: 14111 - protein, 5 aa, Homo sapiens
EECDK

SEQ ID NO: 14112 - protein, 5 aa, Homo sapiens
GKAKK

SEQ ID NO: 14113 - protein, 5 aa, Homo sapiens
CGQLE

SEQ ID NO: 14114 - protein, 5 aa, Homo sapiens
GSDGL

SEQ ID NO: 14115 - protein, 5 aa, Homo sapiens
ENTDD

SEQ ID NO: 14116 - protein, 5 aa, Homo sapiens
YGFGG

SEQ ID NO: 14117 - protein, 5 aa, Homo sapiens
SCAQE

SEQ ID NO: 14118 - protein, 5 aa, Homo sapiens
PMARR

SEQ ID NO: 14119 - protein, 5 aa, Homo sapiens
QLSVS

SEQ ID NO: 14120 - protein, 5 aa, Homo sapiens
GFGQE

SEQ ID NO: 14121 - protein, 5 aa, Homo sapiens
HFVMC

SEQ ID NO: 14122 - protein, 5 aa, Homo sapiens
ESKNE

SEQ ID NO: 14123 - protein, 5 aa, Homo sapiens
KYKLL

SEQ ID NO: 14124 - protein, 5 aa, Homo sapiens
LDRIL

SEQ ID NO: 14125 - protein, 5 aa, Homo sapiens
FSYFP

SEQ ID NO: 14126 - protein, 5 aa, Homo sapiens
VGPLI

SEQ ID NO: 14127 - protein, 5 aa, Homo sapiens
VRVRG

SEQ ID NO: 14128 - protein, 5 aa, Homo sapiens
YELEG

SEQ ID NO: 14129 - protein, 5 aa, Homo sapiens
TEEKK

SEQ ID NO: 14130 - protein, 5 aa, Homo sapiens
LDLFH

SEQ ID NO: 14131 - protein, 5 aa, Homo sapiens
APQRL

SEQ ID NO: 14132 - protein, 5 aa, Homo sapiens
SLLYR

SEQ ID NO: 14133 - protein, 5 aa, Homo sapiens
NEFMV

SEQ ID NO: 14134 - protein, 5 aa, Homo sapiens
SINIR

SEQ ID NO: 14135 - protein, 5 aa, Homo sapiens
VSKRY

SEQ ID NO: 14136 - protein, 5 aa, Homo sapiens
EKVEA

SEQ ID NO: 14137 - protein, 5 aa, Homo sapiens
YATCK

SEQ ID NO: 14138 - protein, 5 aa, Homo sapiens
CLSEP

SEQ ID NO: 14139 - protein, 5 aa, Homo sapiens
RRRLV

SEQ ID NO: 14140 - protein, 5 aa, Homo sapiens
QAASR

SEQ ID NO: 14141 - protein, 5 aa, Homo sapiens
EAHFV

SEQ ID NO: 14142 - protein, 5 aa, Homo sapiens
HLQQW

SEQ ID NO: 14143 - protein, 5 aa, Homo sapiens
WGFQP

SEQ ID NO: 14144 - protein, 5 aa, Homo sapiens
EHIQD

SEQ ID NO: 14145 - protein, 5 aa, Homo sapiens
CGPIR

SEQ ID NO: 14146 - protein, 5 aa, Homo sapiens
KQMAP

SEQ ID NO: 14147 - protein, 5 aa, Homo sapiens
IHNLQ

SEQ ID NO: 14148 - protein, 5 aa, Homo sapiens
KRVLF

SEQ ID NO: 14149 - protein, 5 aa, Homo sapiens
RSSDK

SEQ ID NO: 14150 - protein, 5 aa, Homo sapiens
RKQFE

SEQ ID NO: 14151 - protein, 5 aa, Homo sapiens
ERKED

SEQ ID NO: 14152 - protein, 5 aa, Homo sapiens
KCLLL

SEQ ID NO: 14153 - protein, 5 aa, Homo sapiens
SSFLI

SEQ ID NO: 14154 - protein, 5 aa, Homo sapiens
LSYGA

SEQ ID NO: 14155 - protein, 5 aa, Homo sapiens
APKIG

SEQ ID NO: 14156 - protein, 5 aa, Homo sapiens
EIDMA

SEQ ID NO: 14157 - protein, 5 aa, Homo sapiens
DVGLG

SEQ ID NO: 14158 - protein, 5 aa, Homo sapiens
ARADR

SEQ ID NO: 14159 - protein, 5 aa, Homo sapiens
YPKRD

SEQ ID NO: 14160 - protein, 5 aa, Homo sapiens
NRETL

SEQ ID NO: 14161 - protein, 5 aa, Homo sapiens
KWIHL

SEQ ID NO: 14162 - protein, 5 aa, Homo sapiens
TTPKF

SEQ ID NO: 14163 - protein, 5 aa, Homo sapiens
EGRQL

SEQ ID NO: 14164 - protein, 5 aa, Homo sapiens
ECGKA

SEQ ID NO: 14165 - protein, 5 aa, Homo sapiens
LSVEN

SEQ ID NO: 14166 - protein, 5 aa, Homo sapiens
LVEDN

SEQ ID NO: 14167 - protein, 5 aa, Homo sapiens
IFQIE

SEQ ID NO: 14168 - protein, 5 aa, Homo sapiens
GHGKF

SEQ ID NO: 14169 - protein, 5 aa, Homo sapiens
PILPQ

SEQ ID NO: 14170 - protein, 5 aa, Homo sapiens
WLTEG

SEQ ID NO: 14171 - protein, 5 aa, Homo sapiens
PTTSV

SEQ ID NO: 14172 - protein, 5 aa, Homo sapiens
LSDSE

SEQ ID NO: 14173 - protein, 5 aa, Homo sapiens
KRFLQ

SEQ ID NO: 14174 - protein, 5 aa, Homo sapiens
SDHST

SEQ ID NO: 14175 - protein, 5 aa, Homo sapiens
TGVSH

SEQ ID NO: 14176 - protein, 5 aa, Homo sapiens
YQVLE

SEQ ID NO: 14177 - protein, 5 aa, Homo sapiens
VLAQS

SEQ ID NO: 14178 - protein, 5 aa, Homo sapiens
KMKNM

SEQ ID NO: 14179 - protein, 5 aa, Homo sapiens
TLYKV

SEQ ID NO: 14180 - protein, 5 aa, Homo sapiens
LAPRQ

SEQ ID NO: 14181 - protein, 5 aa, Homo sapiens
PPKPM

SEQ ID NO: 14182 - protein, 5 aa, Homo sapiens
THRLL

SEQ ID NO: 14183 - protein, 5 aa, Homo sapiens
NLLTL

SEQ ID NO: 14184 - protein, 5 aa, Homo sapiens
QTLSK

SEQ ID NO: 14185 - protein, 5 aa, Homo sapiens
RKRMK

SEQ ID NO: 14186 - protein, 5 aa, Homo sapiens
AIAAL

SEQ ID NO: 14187 - protein, 5 aa, Homo sapiens
FDTAL

SEQ ID NO: 14188 - protein, 5 aa, Homo sapiens
RQFIA

SEQ ID NO: 14189 - protein, 5 aa, Homo sapiens
CQNCH

SEQ ID NO: 14190 - protein, 5 aa, Homo sapiens
MHDEE

SEQ ID NO: 14191 - protein, 5 aa, Homo sapiens
TQQAF

SEQ ID NO: 14192 - protein, 5 aa, Homo sapiens
SKTGM

SEQ ID NO: 14193 - protein, 5 aa, Homo sapiens
QDCCA

SEQ ID NO: 14194 - protein, 5 aa, Homo sapiens
DAVTD

SEQ ID NO: 14195 - protein, 5 aa, Homo sapiens
ELLNS

SEQ ID NO: 14196 - protein, 5 aa, Homo sapiens
PGGKL

SEQ ID NO: 14197 - protein, 5 aa, Homo sapiens
LWLFV

SEQ ID NO: 14198 - protein, 5 aa, Homo sapiens
HVHSP

SEQ ID NO: 14199 - protein, 5 aa, Homo sapiens
LDSVM

SEQ ID NO: 14200 - protein, 5 aa, Homo sapiens
YTGPR

SEQ ID NO: 14201 - protein, 5 aa, Homo sapiens
CQYLY

SEQ ID NO: 14202 - protein, 5 aa, Homo sapiens
GCWNK

SEQ ID NO: 14203 - protein, 5 aa, Homo sapiens
TEASS

SEQ ID NO: 14204 - protein, 5 aa, Homo sapiens
GEKHS

SEQ ID NO: 14205 - protein, 5 aa, Homo sapiens
YTSSK

SEQ ID NO: 14206 - protein, 5 aa, Homo sapiens
ATTLG

SEQ ID NO: 14207 - protein, 5 aa, Homo sapiens
GFGML

SEQ ID NO: 14208 - protein, 5 aa, Homo sapiens
TTWLR

SEQ ID NO: 14209 - protein, 5 aa, Homo sapiens
DLLTS

SEQ ID NO: 14210 - protein, 5 aa, Homo sapiens
SCPVG

SEQ ID NO: 14211 - protein, 5 aa, Homo sapiens
LGIFI

SEQ ID NO: 14212 - protein, 5 aa, Homo sapiens
PHQMT

SEQ ID NO: 14213 - protein, 5 aa, Homo sapiens
TNKSA

SEQ ID NO: 14214 - protein, 5 aa, Homo sapiens
SLQVL

SEQ ID NO: 14215 - protein, 5 aa, Homo sapiens
HKAAA

SEQ ID NO: 14216 - protein, 5 aa, Homo sapiens
RSRRS

SEQ ID NO: 14217 - protein, 5 aa, Homo sapiens
LAGHP

SEQ ID NO: 14218 - protein, 5 aa, Homo sapiens
GFTMV

SEQ ID NO: 14219 - protein, 5 aa, Homo sapiens
DFHDT

SEQ ID NO: 14220 - protein, 5 aa, Homo sapiens
LDSEE

SEQ ID NO: 14221 - protein, 5 aa, Homo sapiens
LKSKL

SEQ ID NO: 14222 - protein, 5 aa, Homo sapiens
RQNMG

SEQ ID NO: 14223 - protein, 5 aa, Homo sapiens
SCLLL

SEQ ID NO: 14224 - protein, 5 aa, Homo sapiens
MEAVP

SEQ ID NO: 14225 - protein, 5 aa, Homo sapiens
SAHLS

SEQ ID NO: 14226 - protein, 5 aa, Homo sapiens
SENLT

SEQ ID NO: 14227 - protein, 5 aa, Homo sapiens
EEDDE

SEQ ID NO: 14228 - protein, 5 aa, Homo sapiens
HVSGA

SEQ ID NO: 14229 - protein, 5 aa, Homo sapiens
PVHSS

SEQ ID NO: 14230 - protein, 5 aa, Homo sapiens
PLSPS

SEQ ID NO: 14231 - protein, 5 aa, Homo sapiens
VKVFV

SEQ ID NO: 14232 - protein, 5 aa, Homo sapiens
VPFHG

SEQ ID NO: 14233 - protein, 5 aa, Homo sapiens
GKKAK

SEQ ID NO: 14234 - protein, 5 aa, Homo sapiens
LETNV

SEQ ID NO: 14235 - protein, 5 aa, Homo sapiens
PDSDP

SEQ ID NO: 14236 - protein, 5 aa, Homo sapiens
TSQEP

SEQ ID NO: 14237 - protein, 5 aa, Homo sapiens
GKFSK

SEQ ID NO: 14238 - protein, 5 aa, Homo sapiens
VMGWP

SEQ ID NO: 14239 - protein, 5 aa, Homo sapiens
PPKPM

SEQ ID NO: 14240 - protein, 5 aa, Homo sapiens
AHQLL

SEQ ID NO: 14241 - protein, 5 aa, Homo sapiens
GEEGK

SEQ ID NO: 14242 - protein, 5 aa, Homo sapiens
AGRPV

SEQ ID NO: 14243 - protein, 5 aa, Homo sapiens
ALATN

SEQ ID NO: 14244 - protein, 5 aa, Homo sapiens
EDWRE

SEQ ID NO: 14245 - protein, 5 aa, Homo sapiens
LANCF

SEQ ID NO: 14246 - protein, 5 aa, Homo sapiens
EARVQ

SEQ ID NO: 14247 - protein, 5 aa, Homo sapiens
RVKMS

SEQ ID NO: 14248 - protein, 5 aa, Homo sapiens
GPQEA

SEQ ID NO: 14249 - protein, 5 aa, Homo sapiens
KPHLS

SEQ ID NO: 14250 - protein, 5 aa, Homo sapiens
LGVSP

SEQ ID NO: 14251 - protein, 5 aa, Homo sapiens
ACRLL

SEQ ID NO: 14252 - protein, 5 aa, Homo sapiens
LDKNL

SEQ ID NO: 14253 - protein, 5 aa, Homo sapiens
RSCLW

SEQ ID NO: 14254 - protein, 5 aa, Homo sapiens
DQVCT

SEQ ID NO: 14255 - protein, 5 aa, Homo sapiens
EQERL

SEQ ID NO: 14256 - protein, 5 aa, Homo sapiens
LPEKY

SEQ ID NO: 14257 - protein, 5 aa, Homo sapiens
YTSSK

SEQ ID NO: 14258 - protein, 5 aa, Homo sapiens
FFNYM

SEQ ID NO: 14259 - protein, 5 aa, Homo sapiens
SDEFM

SEQ ID NO: 14260 - protein, 5 aa, Homo sapiens
RRSQQ

SEQ ID NO: 14261 - protein, 5 aa, Homo sapiens
PSPPS

SEQ ID NO: 14262 - protein, 5 aa, Homo sapiens
SAGPA

SEQ ID NO: 14263 - protein, 5 aa, Homo sapiens
NPAVR

SEQ ID NO: 14264 - protein, 5 aa, Homo sapiens
RDQEN

SEQ ID NO: 14265 - protein, 5 aa, Homo sapiens
AVYYC

SEQ ID NO: 14266 - protein, 5 aa, Homo sapiens
VLCTE

SEQ ID NO: 14267 - protein, 5 aa, Homo sapiens
GKTNS

SEQ ID NO: 14268 - protein, 5 aa, Homo sapiens
VRRYQ

SEQ ID NO: 14269 - protein, 5 aa, Homo sapiens
GPARH

SEQ ID NO: 14270 - protein, 5 aa, Homo sapiens
FLNRY

SEQ ID NO: 14271 - protein, 5 aa, Homo sapiens
PRRGG

SEQ ID NO: 14272 - protein, 5 aa, Homo sapiens
VRMTQ

SEQ ID NO: 14273 - protein, 5 aa, Homo sapiens
ATVIG

SEQ ID NO: 14274 - protein, 5 aa, Homo sapiens
SYLYL

SEQ ID NO: 14275 - protein, 5 aa, Homo sapiens
GKDRG

SEQ ID NO: 14276 - protein, 5 aa, Homo sapiens
ESERD

SEQ ID NO: 14277 - protein, 5 aa, Homo sapiens
TSSLR

SEQ ID NO: 14278 - protein, 5 aa, Homo sapiens
RTQPE

SEQ ID NO: 14279 - protein, 5 aa, Homo sapiens
PQQPA

SEQ ID NO: 14280 - protein, 5 aa, Homo sapiens
AASGR

SEQ ID NO: 14281 - protein, 5 aa, Homo sapiens
MMDEL

SEQ ID NO: 14282 - protein, 5 aa, Homo sapiens
NTTLE

SEQ ID NO: 14283 - protein, 5 aa, Homo sapiens
PLLKH

SEQ ID NO: 14284 - protein, 5 aa, Homo sapiens
SDKPL

SEQ ID NO: 14285 - protein, 5 aa, Homo sapiens
YKRRK

SEQ ID NO: 14286 - protein, 5 aa, Homo sapiens
EEEGV

SEQ ID NO: 14287 - protein, 5 aa, Homo sapiens
SEVGS

SEQ ID NO: 14288 - protein, 5 aa, Homo sapiens
EMTAS

SEQ ID NO: 14289 - protein, 5 aa, Homo sapiens
GRSRY

SEQ ID NO: 14290 - protein, 5 aa, Homo sapiens
PFTDV

SEQ ID NO: 14291 - protein, 5 aa, Homo sapiens
SCEEL

SEQ ID NO: 14292 - protein, 5 aa, Homo sapiens
AERTC

SEQ ID NO: 14293 - protein, 5 aa, Homo sapiens
ISQSE

SEQ ID NO: 14294 - protein, 5 aa, Homo sapiens
LTLRS

SEQ ID NO: 14295 - protein, 5 aa, Homo sapiens
KALLQ

SEQ ID NO: 14296 - protein, 5 aa, Homo sapiens
AAALD

SEQ ID NO: 14297 - protein, 5 aa, Homo sapiens
THQSL

SEQ ID NO: 14298 - protein, 5 aa, Homo sapiens
WDTTI

SEQ ID NO: 14299 - protein, 5 aa, Homo sapiens
TPLIT

SEQ ID NO: 14300 - protein, 5 aa, Homo sapiens
TEERP

SEQ ID NO: 14301 - protein, 5 aa, Homo sapiens
FISLL

SEQ ID NO: 14302 - protein, 5 aa, Homo sapiens
SSHRD

SEQ ID NO: 14303 - protein, 5 aa, Homo sapiens
ISLGL

SEQ ID NO: 14304 - protein, 5 aa, Homo sapiens
VGLSK

SEQ ID NO: 14305 - protein, 5 aa, Homo sapiens
FLARP

SEQ ID NO: 14306 - protein, 5 aa, Homo sapiens
EIELE

SEQ ID NO: 14307 - protein, 5 aa, Homo sapiens
LDPFP

SEQ ID NO: 14308 - protein, 5 aa, Homo sapiens
IRRMN

SEQ ID NO: 14309 - protein, 5 aa, Homo sapiens
PAHWK

SEQ ID NO: 14310 - protein, 5 aa, Homo sapiens
PPKPM

SEQ ID NO: 14311 - protein, 5 aa, Homo sapiens
GCLPI

SEQ ID NO: 14312 - protein, 5 aa, Homo sapiens
VKVWK

SEQ ID NO: 14313 - protein, 5 aa, Homo sapiens
NLFFL

SEQ ID NO: 14314 - protein, 5 aa, Homo sapiens
MELTM

SEQ ID NO: 14315 - protein, 5 aa, Homo sapiens
PSLSQ

SEQ ID NO: 14316 - protein, 5 aa, Homo sapiens
QKKKR

SEQ ID NO: 14317 - protein, 5 aa, Homo sapiens
GGGKD

SEQ ID NO: 14318 - protein, 5 aa, Homo sapiens
NLHDA

SEQ ID NO: 14319 - protein, 5 aa, Homo sapiens
TEKYR

SEQ ID NO: 14320 - protein, 5 aa, Homo sapiens
SVVKV

SEQ ID NO: 14321 - protein, 5 aa, Homo sapiens
PGVSG

SEQ ID NO: 14322 - protein, 5 aa, Homo sapiens
WPPRG

SEQ ID NO: 14323 - protein, 5 aa, Homo sapiens
NPLGF

SEQ ID NO: 14324 - protein, 5 aa, Homo sapiens
NLTVI

SEQ ID NO: 14325 - protein, 5 aa, Homo sapiens
AFYGV

SEQ ID NO: 14326 - protein, 5 aa, Homo sapiens
LIVFV

SEQ ID NO: 14327 - protein, 5 aa, Homo sapiens
SRRSQ

SEQ ID NO: 14328 - protein, 5 aa, Homo sapiens
KPELE

SEQ ID NO: 14329 - protein, 5 aa, Homo sapiens
GQGTV

SEQ ID NO: 14330 - protein, 5 aa, Homo sapiens
VENGP

SEQ ID NO: 14331 - protein, 5 aa, Homo sapiens
ISTDV

SEQ ID NO: 14332 - protein, 5 aa, Homo sapiens
AKVSV

SEQ ID NO: 14333 - protein, 5 aa, Homo sapiens
SIYCD

SEQ ID NO: 14334 - protein, 5 aa, Homo sapiens
FGCGK

SEQ ID NO: 14335 - protein, 5 aa, Homo sapiens
LAGAP

SEQ ID NO: 14336 - protein, 5 aa, Homo sapiens
DSSMR

SEQ ID NO: 14337 - protein, 5 aa, Homo sapiens
LSPQP

SEQ ID NO: 14338 - protein, 5 aa, Homo sapiens
LEFSA

SEQ ID NO: 14339 - protein, 5 aa, Homo sapiens
HGAPN

SEQ ID NO: 14340 - protein, 5 aa, Homo sapiens
TKGSP

SEQ ID NO: 14341 - protein, 5 aa, Homo sapiens
LVIDN

SEQ ID NO: 14342 - protein, 5 aa, Homo sapiens
NQYLI

SEQ ID NO: 14343 - protein, 5 aa, Homo sapiens
RIKVE

SEQ ID NO: 14344 - protein, 5 aa, Homo sapiens
PYKCK

SEQ ID NO: 14345 - protein, 5 aa, Homo sapiens
AENEF

SEQ ID NO: 14346 - protein, 5 aa, Homo sapiens
VRERR

SEQ ID NO: 14347 - protein, 5 aa, Homo sapiens
EEHPL

SEQ ID NO: 14348 - protein, 5 aa, Homo sapiens
KHKED

SEQ ID NO: 14349 - protein, 5 aa, Homo sapiens
LELSA

SEQ ID NO: 14350 - protein, 5 aa, Homo sapiens
SKSTI

SEQ ID NO: 14351 - protein, 5 aa, Homo sapiens
YTSAK

SEQ ID NO: 14352 - protein, 5 aa, Homo sapiens
LWEGI

SEQ ID NO: 14353 - protein, 5 aa, Homo sapiens
SAPHR

SEQ ID NO: 14354 - protein, 5 aa, Homo sapiens
SSLYL

SEQ ID NO: 14355 - protein, 5 aa, Homo sapiens
DLLHI

SEQ ID NO: 14356 - protein, 5 aa, Homo sapiens
ENRTD

SEQ ID NO: 14357 - protein, 5 aa, Homo sapiens
QSSHA

SEQ ID NO: 14358 - protein, 5 aa, Homo sapiens
LNPPK

SEQ ID NO: 14359 - protein, 5 aa, Homo sapiens
QNWWV

SEQ ID NO: 14360 - protein, 5 aa, Homo sapiens
SSPCG

SEQ ID NO: 14361 - protein, 5 aa, Homo sapiens
HDGKC

SEQ ID NO: 14362 - protein, 5 aa, Homo sapiens
SWCDS

SEQ ID NO: 14363 - protein, 5 aa, Homo sapiens
MMTAK

SEQ ID NO: 14364 - protein, 5 aa, Homo sapiens
IVEWH

SEQ ID NO: 14365 - protein, 5 aa, Homo sapiens
GPVPS

SEQ ID NO: 14366 - protein, 5 aa, Homo sapiens
QLGAR

SEQ ID NO: 14367 - protein, 5 aa, Homo sapiens
ACTGC

SEQ ID NO: 14368 - protein, 5 aa, Homo sapiens
EILQV

SEQ ID NO: 14369 - protein, 5 aa, Homo sapiens
TVISL

SEQ ID NO: 14370 - protein, 5 aa, Homo sapiens
TIACS

SEQ ID NO: 14371 - protein, 5 aa, Homo sapiens
TGKKH

SEQ ID NO: 14372 - protein, 5 aa, Homo sapiens
ECGKA

SEQ ID NO: 14373 - protein, 5 aa, Homo sapiens
SQIPS

SEQ ID NO: 14374 - protein, 5 aa, Homo sapiens
SLHGH

SEQ ID NO: 14375 - protein, 5 aa, Homo sapiens
EKKKM

SEQ ID NO: 14376 - protein, 5 aa, Homo sapiens
KSDSD

SEQ ID NO: 14377 - protein, 5 aa, Homo sapiens
SYSVS

SEQ ID NO: 14378 - protein, 5 aa, Homo sapiens
EVNAL

SEQ ID NO: 14379 - protein, 5 aa, Homo sapiens
QIVQS

SEQ ID NO: 14380 - protein, 5 aa, Homo sapiens
ACPLG

SEQ ID NO: 14381 - protein, 5 aa, Homo sapiens
IGWNI

SEQ ID NO: 14382 - protein, 5 aa, Homo sapiens
SSHAN

SEQ ID NO: 14383 - protein, 5 aa, Homo sapiens
QPCGC

SEQ ID NO: 14384 - protein, 5 aa, Homo sapiens
KNERW

SEQ ID NO: 14385 - protein, 5 aa, Homo sapiens
HKMSH

SEQ ID NO: 14386 - protein, 5 aa, Homo sapiens
KPTAF

SEQ ID NO: 14387 - protein, 5 aa, Homo sapiens
ARMCH

SEQ ID NO: 14388 - protein, 5 aa, Homo sapiens
SQKLQ

SEQ ID NO: 14389 - protein, 5 aa, Homo sapiens
EDNNE

SEQ ID NO: 14390 - protein, 5 aa, Homo sapiens
RTYLP

SEQ ID NO: 14391 - protein, 5 aa, Homo sapiens
MAGDR

SEQ ID NO: 14392 - protein, 5 aa, Homo sapiens
KKHAK

SEQ ID NO: 14393 - protein, 5 aa, Homo sapiens
EEDAL

SEQ ID NO: 14394 - protein, 5 aa, Homo sapiens
YQTRY

SEQ ID NO: 14395 - protein, 5 aa, Homo sapiens
KITPQ

SEQ ID NO: 14396 - protein, 5 aa, Homo sapiens
RIHSG

SEQ ID NO: 14397 - protein, 5 aa, Homo sapiens
LPQPL

SEQ ID NO: 14398 - protein, 5 aa, Homo sapiens
CSQAS

SEQ ID NO: 14399 - protein, 5 aa, Homo sapiens
RRRLV

SEQ ID NO: 14400 - protein, 5 aa, Homo sapiens
HDVYI

SEQ ID NO: 14401 - protein, 5 aa, Homo sapiens
QVRIE

SEQ ID NO: 14402 - protein, 5 aa, Homo sapiens
SLKGI

SEQ ID NO: 14403 - protein, 5 aa, Homo sapiens
AEAEK

SEQ ID NO: 14404 - protein, 5 aa, Homo sapiens
SVKTK

SEQ ID NO: 14405 - protein, 5 aa, Homo sapiens
AAYFV

SEQ ID NO: 14406 - protein, 5 aa, Homo sapiens
VKEKE

SEQ ID NO: 14407 - protein, 5 aa, Homo sapiens
PLRTS

SEQ ID NO: 14408 - protein, 5 aa, Homo sapiens
PASAS

SEQ ID NO: 14409 - protein, 5 aa, Homo sapiens
CSVKM

SEQ ID NO: 14410 - protein, 5 aa, Homo sapiens
QAERS

SEQ ID NO: 14411 - protein, 5 aa, Homo sapiens
PCDRP

SEQ ID NO: 14412 - protein, 5 aa, Homo sapiens
NAIHA

SEQ ID NO: 14413 - protein, 5 aa, Homo sapiens
RIAAT

SEQ ID NO: 14414 - protein, 5 aa, Homo sapiens
KKPRF

SEQ ID NO: 14415 - protein, 5 aa, Homo sapiens
LQWWK

SEQ ID NO: 14416 - protein, 5 aa, Homo sapiens
DEVQI

SEQ ID NO: 14417 - protein, 5 aa, Homo sapiens
PAGMQ

SEQ ID NO: 14418 - protein, 5 aa, Homo sapiens
SRTKM

SEQ ID NO: 14419 - protein, 5 aa, Homo sapiens
KMVNS

SEQ ID NO: 14420 - protein, 5 aa, Homo sapiens
PCNPL

SEQ ID NO: 14421 - protein, 5 aa, Homo sapiens
KGPDP

SEQ ID NO: 14422 - protein, 5 aa, Homo sapiens
RRRWT

SEQ ID NO: 14423 - protein, 5 aa, Homo sapiens
SEGKS

SEQ ID NO: 14424 - protein, 5 aa, Homo sapiens
PACFL

SEQ ID NO: 14425 - protein, 5 aa, Homo sapiens
TAVWV

SEQ ID NO: 14426 - protein, 5 aa, Homo sapiens
ALFVL

SEQ ID NO: 14427 - protein, 5 aa, Homo sapiens
FTSPL

SEQ ID NO: 14428 - protein, 5 aa, Homo sapiens
PVTVL

SEQ ID NO: 14429 - protein, 5 aa, Homo sapiens
KLVKD

SEQ ID NO: 14430 - protein, 5 aa, Homo sapiens
AQVFE

SEQ ID NO: 14431 - protein, 5 aa, Homo sapiens
GPPLE

SEQ ID NO: 14432 - protein, 5 aa, Homo sapiens
SCPVG

SEQ ID NO: 14433 - protein, 5 aa, Homo sapiens
VLLGV

SEQ ID NO: 14434 - protein, 5 aa, Homo sapiens
SVTVE

SEQ ID NO: 14435 - protein, 5 aa, Homo sapiens
RSIKV

SEQ ID NO: 14436 - protein, 5 aa, Homo sapiens
KAKGK

SEQ ID NO: 14437 - protein, 5 aa, Homo sapiens
SSLPA

SEQ ID NO: 14438 - protein, 5 aa, Homo sapiens
LKVPS

SEQ ID NO: 14439 - protein, 5 aa, Homo sapiens
ALSTS

SEQ ID NO: 14440 - protein, 5 aa, Homo sapiens
QWFTG

SEQ ID NO: 14441 - protein, 5 aa, Homo sapiens
DVLKS

SEQ ID NO: 14442 - protein, 5 aa, Homo sapiens
PPSAQ

SEQ ID NO: 14443 - protein, 5 aa, Homo sapiens
SRKKI

SEQ ID NO: 14444 - protein, 5 aa, Homo sapiens
NAHTF

SEQ ID NO: 14445 - protein, 5 aa, Homo sapiens
KTTAL

SEQ ID NO: 14446 - protein, 5 aa, Homo sapiens
PQLLK

SEQ ID NO: 14447 - protein, 5 aa, Homo sapiens
PPVSR

SEQ ID NO: 14448 - protein, 5 aa, Homo sapiens
EEEDS

SEQ ID NO: 14449 - protein, 5 aa, Homo sapiens
KFWGT

SEQ ID NO: 14450 - protein, 5 aa, Homo sapiens
SHCLC

SEQ ID NO: 14451 - protein, 5 aa, Homo sapiens
GMVPK

SEQ ID NO: 14452 - protein, 5 aa, Homo sapiens
LDSVF

SEQ ID NO: 14453 - protein, 5 aa, Homo sapiens
PILPQ

SEQ ID NO: 14454 - protein, 5 aa, Homo sapiens
IYSED

SEQ ID NO: 14455 - protein, 5 aa, Homo sapiens
AGGAS

SEQ ID NO: 14456 - protein, 5 aa, Homo sapiens
TSAES

SEQ ID NO: 14457 - protein, 5 aa, Homo sapiens
HRKCF

SEQ ID NO: 14458 - protein, 5 aa, Homo sapiens
EPAAA

SEQ ID NO: 14459 - protein, 5 aa, Homo sapiens
HSTEV

SEQ ID NO: 14460 - protein, 5 aa, Homo sapiens
AEVAS

SEQ ID NO: 14461 - protein, 5 aa, Homo sapiens
VPVLR

SEQ ID NO: 14462 - protein, 5 aa, Homo sapiens
KRTRS

SEQ ID NO: 14463 - protein, 5 aa, Homo sapiens
HFLGK

SEQ ID NO: 14464 - protein, 5 aa, Homo sapiens
FRCSP

SEQ ID NO: 14465 - protein, 5 aa, Homo sapiens
LSIVF

SEQ ID NO: 14466 - protein, 5 aa, Homo sapiens
RLRSR

SEQ ID NO: 14467 - protein, 5 aa, Homo sapiens
ETRSL

SEQ ID NO: 14468 - protein, 5 aa, Homo sapiens
LQLLS

SEQ ID NO: 14469 - protein, 5 aa, Homo sapiens
MYGRK

SEQ ID NO: 14470 - protein, 5 aa, Homo sapiens
KIMTC

SEQ ID NO: 14471 - protein, 5 aa, Homo sapiens
WGSRR

SEQ ID NO: 14472 - protein, 5 aa, Homo sapiens
ASETN

SEQ ID NO: 14473 - protein, 5 aa, Homo sapiens
GRQSS

SEQ ID NO: 14474 - protein, 5 aa, Homo sapiens
FKALL

SEQ ID NO: 14475 - protein, 5 aa, Homo sapiens
WRNEL

SEQ ID NO: 14476 - protein, 5 aa, Homo sapiens
SCSKG

SEQ ID NO: 14477 - protein, 5 aa, Homo sapiens
QSTDE

SEQ ID NO: 14478 - protein, 5 aa, Homo sapiens
HGESR

SEQ ID NO: 14479 - protein, 5 aa, Homo sapiens
FRAGL

SEQ ID NO: 14480 - protein, 5 aa, Homo sapiens
SKNFP

SEQ ID NO: 14481 - protein, 5 aa, Homo sapiens
NLLTS

SEQ ID NO: 14482 - protein, 5 aa, Homo sapiens
VIIQD

SEQ ID NO: 14483 - protein, 5 aa, Homo sapiens
HVKTD

SEQ ID NO: 14484 - protein, 5 aa, Homo sapiens
LVIDN

SEQ ID NO: 14485 - protein, 5 aa, Homo sapiens
SDLCR

SEQ ID NO: 14486 - protein, 5 aa, Homo sapiens
SPVFA

SEQ ID NO: 14487 - protein, 5 aa, Homo sapiens
LCEVW

SEQ ID NO: 14488 - protein, 5 aa, Homo sapiens
AKVFV

SEQ ID NO: 14489 - protein, 5 aa, Homo sapiens
EEWDD

SEQ ID NO: 14490 - protein, 5 aa, Homo sapiens
EKPYK

SEQ ID NO: 14491 - protein, 5 aa, Homo sapiens
PPKPM

SEQ ID NO: 14492 - protein, 5 aa, Homo sapiens
ASTMH

SEQ ID NO: 14493 - protein, 5 aa, Homo sapiens
NLHVP

SEQ ID NO: 14494 - protein, 5 aa, Homo sapiens
AEAME

SEQ ID NO: 14495 - protein, 5 aa, Homo sapiens
TVNLL

SEQ ID NO: 14496 - protein, 5 aa, Homo sapiens
VFTEP

SEQ ID NO: 14497 - protein, 5 aa, Homo sapiens
AKAIG

SEQ ID NO: 14498 - protein, 5 aa, Homo sapiens
RRTRC

SEQ ID NO: 14499 - protein, 5 aa, Homo sapiens
KIMTC

SEQ ID NO: 14500 - protein, 5 aa, Homo sapiens
CRIIS

SEQ ID NO: 14501 - protein, 5 aa, Homo sapiens
IVMLL

SEQ ID NO: 14502 - protein, 5 aa, Homo sapiens
KLLVD

SEQ ID NO: 14503 - protein, 5 aa, Homo sapiens
FCILL

SEQ ID NO: 14504 - protein, 5 aa, Homo sapiens
ESKHN

SEQ ID NO: 14505 - protein, 5 aa, Homo sapiens
DKLGQ

SEQ ID NO: 14506 - protein, 5 aa, Homo sapiens
YGFGG

SEQ ID NO: 14507 - protein, 5 aa, Homo sapiens
RNANV

SEQ ID NO: 14508 - protein, 5 aa, Homo sapiens
LNGVS

SEQ ID NO: 14509 - protein, 5 aa, Homo sapiens
KGGKG

SEQ ID NO: 14510 - protein, 5 aa, Homo sapiens
TTVGQ

SEQ ID NO: 14511 - protein, 5 aa, Homo sapiens
EVPSS

SEQ ID NO: 14512 - protein, 5 aa, Homo sapiens
EDDKC

SEQ ID NO: 14513 - protein, 5 aa, Homo sapiens
AHLSH

SEQ ID NO: 14514 - protein, 5 aa, Homo sapiens
VTSGP

SEQ ID NO: 14515 - protein, 5 aa, Homo sapiens
LQTSI

SEQ ID NO: 14516 - protein, 5 aa, Homo sapiens
TILKN

SEQ ID NO: 14517 - protein, 5 aa, Homo sapiens
AVTSH

SEQ ID NO: 14518 - protein, 5 aa, Homo sapiens
VSALS

SEQ ID NO: 14519 - protein, 5 aa, Homo sapiens
CFPNS

SEQ ID NO: 14520 - protein, 5 aa, Homo sapiens
HLLDL

SEQ ID NO: 14521 - protein, 5 aa, Homo sapiens
RRTEE

SEQ ID NO: 14522 - protein, 5 aa, Homo sapiens
SQGGK

SEQ ID NO: 14523 - protein, 5 aa, Homo sapiens
IYTYP

SEQ ID NO: 14524 - protein, 5 aa, Homo sapiens
ILATL

SEQ ID NO: 14525 - protein, 5 aa, Homo sapiens
EQRPL

SEQ ID NO: 14526 - protein, 5 aa, Homo sapiens
GLQLE

SEQ ID NO: 14527 - protein, 5 aa, Homo sapiens
AEDVI

SEQ ID NO: 14528 - protein, 5 aa, Homo sapiens
GALSL

SEQ ID NO: 14529 - protein, 5 aa, Homo sapiens
SCTLQ

SEQ ID NO: 14530 - protein, 5 aa, Homo sapiens
RTSTI

SEQ ID NO: 14531 - protein, 5 aa, Homo sapiens
KSHFM

SEQ ID NO: 14532 - protein, 5 aa, Homo sapiens
FETTI

SEQ ID NO: 14533 - protein, 5 aa, Homo sapiens
EKTVK

SEQ ID NO: 14534 - protein, 5 aa, Homo sapiens
TSSYL

SEQ ID NO: 14535 - protein, 5 aa, Homo sapiens
FRCSP

SEQ ID NO: 14536 - protein, 5 aa, Homo sapiens
RGERA

SEQ ID NO: 14537 - protein, 5 aa, Homo sapiens
DFAAM

SEQ ID NO: 14538 - protein, 5 aa, Homo sapiens
PHSHY

SEQ ID NO: 14539 - protein, 5 aa, Homo sapiens
DRVSF

SEQ ID NO: 14540 - protein, 5 aa, Homo sapiens
ETLQM

SEQ ID NO: 14541 - protein, 5 aa, Homo sapiens
VWRMH

SEQ ID NO: 14542 - protein, 5 aa, Homo sapiens
PQPPE

SEQ ID NO: 14543 - protein, 5 aa, Homo sapiens
TFIPI

SEQ ID NO: 14544 - protein, 5 aa, Homo sapiens
LLFSR

SEQ ID NO: 14545 - protein, 5 aa, Homo sapiens
YLSYN

SEQ ID NO: 14546 - protein, 5 aa, Homo sapiens
VRGPQ

SEQ ID NO: 14547 - protein, 5 aa, Homo sapiens
IQFMP

SEQ ID NO: 14548 - protein, 5 aa, Homo sapiens
GPGID

SEQ ID NO: 14549 - protein, 5 aa, Homo sapiens
QGGFI

SEQ ID NO: 14550 - protein, 5 aa, Homo sapiens
LNPIL

SEQ ID NO: 14551 - protein, 5 aa, Homo sapiens
NAILQ

SEQ ID NO: 14552 - protein, 5 aa, Homo sapiens
TDARS

SEQ ID NO: 14553 - protein, 5 aa, Homo sapiens
KRSAL

SEQ ID NO: 14554 - protein, 5 aa, Homo sapiens
EESSE

SEQ ID NO: 14555 - protein, 5 aa, Homo sapiens
FTWTL

SEQ ID NO: 14556 - protein, 5 aa, Homo sapiens
TFFNI

SEQ ID NO: 14557 - protein, 5 aa, Homo sapiens
MELTF

SEQ ID NO: 14558 - protein, 5 aa, Homo sapiens
VSGKV

SEQ ID NO: 14559 - protein, 5 aa, Homo sapiens
HSKET

SEQ ID NO: 14560 - protein, 5 aa, Homo sapiens
KYRVK

SEQ ID NO: 14561 - protein, 5 aa, Homo sapiens
TDLQI

SEQ ID NO: 14562 - protein, 5 aa, Homo sapiens
CAGEK

SEQ ID NO: 14563 - protein, 5 aa, Homo sapiens
LYQVD

SEQ ID NO: 14564 - protein, 5 aa, Homo sapiens
QFVLA

SEQ ID NO: 14565 - protein, 5 aa, Homo sapiens
APLES

SEQ ID NO: 14566 - protein, 5 aa, Homo sapiens
IRINP

SEQ ID NO: 14567 - protein, 5 aa, Homo sapiens
KFRPY

SEQ ID NO: 14568 - protein, 5 aa, Homo sapiens
SAEPC

SEQ ID NO: 14569 - protein, 5 aa, Homo sapiens
SAKKL

SEQ ID NO: 14570 - protein, 5 aa, Homo sapiens
VLVGK

SEQ ID NO: 14571 - protein, 5 aa, Homo sapiens
SGKKA

SEQ ID NO: 14572 - protein, 5 aa, Homo sapiens
ENLGG

SEQ ID NO: 14573 - protein, 5 aa, Homo sapiens
LKRDF

SEQ ID NO: 14574 - protein, 5 aa, Homo sapiens
LGLQA

SEQ ID NO: 14575 - protein, 5 aa, Homo sapiens
SYSVS

SEQ ID NO: 14576 - protein, 5 aa, Homo sapiens
ERERL

SEQ ID NO: 14577 - protein, 5 aa, Homo sapiens
TGRWK

SEQ ID NO: 14578 - protein, 5 aa, Homo sapiens
QINIS

SEQ ID NO: 14579 - protein, 5 aa, Homo sapiens
LIELH

SEQ ID NO: 14580 - protein, 5 aa, Homo sapiens
ARRLR

SEQ ID NO: 14581 - protein, 5 aa, Homo sapiens
NVNDE

SEQ ID NO: 14582 - protein, 5 aa, Homo sapiens
LRRNT

SEQ ID NO: 14583 - protein, 5 aa, Homo sapiens
FNAQV

SEQ ID NO: 14584 - protein, 5 aa, Homo sapiens
DETSI

SEQ ID NO: 14585 - protein, 5 aa, Homo sapiens
LLRPV

SEQ ID NO: 14586 - protein, 5 aa, Homo sapiens
TGWAK

SEQ ID NO: 14587 - protein, 5 aa, Homo sapiens
GRRTF

SEQ ID NO: 14588 - protein, 5 aa, Homo sapiens
SSAYC

SEQ ID NO: 14589 - protein, 5 aa, Homo sapiens
HEMTH

SEQ ID NO: 14590 - protein, 5 aa, Homo sapiens
YTSSK

SEQ ID NO: 14591 - protein, 5 aa, Homo sapiens
LQEYL

SEQ ID NO: 14592 - protein, 5 aa, Homo sapiens
REGEE

SEQ ID NO: 14593 - protein, 5 aa, Homo sapiens
EVLLC

SEQ ID NO: 14594 - protein, 5 aa, Homo sapiens
EIDMA

SEQ ID NO: 14595 - protein, 5 aa, Homo sapiens
AQTRL

SEQ ID NO: 14596 - protein, 5 aa, Homo sapiens
KSAGG

SEQ ID NO: 14597 - protein, 5 aa, Homo sapiens
LHMKK

SEQ ID NO: 14598 - protein, 5 aa, Homo sapiens
PGPGR

SEQ ID NO: 14599 - protein, 5 aa, Homo sapiens
FWLLP

SEQ ID NO: 14600 - protein, 5 aa, Homo sapiens
GCNNQ

SEQ ID NO: 14601 - protein, 5 aa, Homo sapiens
HVQEH

SEQ ID NO: 14602 - protein, 5 aa, Homo sapiens
RTLAP

SEQ ID NO: 14603 - protein, 5 aa, Homo sapiens
HKKTH

SEQ ID NO: 14604 - protein, 5 aa, Homo sapiens
ELNNM

SEQ ID NO: 14605 - protein, 5 aa, Homo sapiens
GKLLL

SEQ ID NO: 14606 - protein, 5 aa, Homo sapiens
DLQKT

SEQ ID NO: 14607 - protein, 5 aa, Homo sapiens
ELAAL

SEQ ID NO: 14608 - protein, 5 aa, Homo sapiens
LSSYF

SEQ ID NO: 14609 - protein, 5 aa, Homo sapiens
KRKGL

SEQ ID NO: 14610 - protein, 5 aa, Homo sapiens
KRKGR

SEQ ID NO: 14611 - protein, 5 aa, Homo sapiens
FFLEE

SEQ ID NO: 14612 - protein, 5 aa, Homo sapiens
NFDED

SEQ ID NO: 14613 - protein, 5 aa, Homo sapiens
KSMLQ

SEQ ID NO: 14614 - protein, 5 aa, Homo sapiens
SGPWL

SEQ ID NO: 14615 - protein, 5 aa, Homo sapiens
VLLPS

SEQ ID NO: 14616 - protein, 5 aa, Homo sapiens
GPPPT

SEQ ID NO: 14617 - protein, 5 aa, Homo sapiens
GSEED

SEQ ID NO: 14618 - protein, 5 aa, Homo sapiens
GLSSG

SEQ ID NO: 14619 - protein, 5 aa, Homo sapiens
ALGLP

SEQ ID NO: 14620 - protein, 5 aa, Homo sapiens
YTSFD

SEQ ID NO: 14621 - protein, 5 aa, Homo sapiens
YGFGG

SEQ ID NO: 14622 - protein, 5 aa, Homo sapiens
QPMET

SEQ ID NO: 14623 - protein, 5 aa, Homo sapiens
LGDSM

SEQ ID NO: 14624 - protein, 5 aa, Homo sapiens
LILYF

SEQ ID NO: 14625 - protein, 5 aa, Homo sapiens
SVVSR

SEQ ID NO: 14626 - protein, 5 aa, Homo sapiens
EDFAC

SEQ ID NO: 14627 - protein, 5 aa, Homo sapiens
FFSHR

SEQ ID NO: 14628 - protein, 5 aa, Homo sapiens
EQFAN

SEQ ID NO: 14629 - protein, 5 aa, Homo sapiens
TIASH

SEQ ID NO: 14630 - protein, 5 aa, Homo sapiens
SRRKT

SEQ ID NO: 14631 - protein, 5 aa, Homo sapiens
ISTQT

SEQ ID NO: 14632 - protein, 5 aa, Homo sapiens
KDRTK

SEQ ID NO: 14633 - protein, 5 aa, Homo sapiens
NPQGS

SEQ ID NO: 14634 - protein, 5 aa, Homo sapiens
VEEKK

SEQ ID NO: 14635 - protein, 5 aa, Homo sapiens
SFLKE

SEQ ID NO: 14636 - protein, 5 aa, Homo sapiens
AYDRH

SEQ ID NO: 14637 - protein, 5 aa, Homo sapiens
PQSIV

SEQ ID NO: 14638 - protein, 5 aa, Homo sapiens
RRRLH

SEQ ID NO: 14639 - protein, 5 aa, Homo sapiens
VCAEV

SEQ ID NO: 14640 - protein, 5 aa, Homo sapiens
EEMSG

SEQ ID NO: 14641 - protein, 5 aa, Homo sapiens
SGKWE

SEQ ID NO: 14642 - protein, 5 aa, Homo sapiens
LWEEP

SEQ ID NO: 14643 - protein, 5 aa, Homo sapiens
VLKPV

SEQ ID NO: 14644 - protein, 5 aa, Homo sapiens
GIFCN

SEQ ID NO: 14645 - protein, 5 aa, Homo sapiens
MAVES

SEQ ID NO: 14646 - protein, 5 aa, Homo sapiens
SLFVN

SEQ ID NO: 14647 - protein, 5 aa, Homo sapiens
SLHGH

SEQ ID NO: 14648 - protein, 5 aa, Homo sapiens
MRDEL

SEQ ID NO: 14649 - protein, 5 aa, Homo sapiens
PAPQY

SEQ ID NO: 14650 - protein, 5 aa, Homo sapiens
LRLCT

SEQ ID NO: 14651 - protein, 5 aa, Homo sapiens
IRQGH

SEQ ID NO: 14652 - protein, 5 aa, Homo sapiens
MIYIR

SEQ ID NO: 14653 - protein, 5 aa, Homo sapiens
LGQDL

SEQ ID NO: 14654 - protein, 5 aa, Homo sapiens
DIKDT

SEQ ID NO: 14655 - protein, 5 aa, Homo sapiens
KKRMS

SEQ ID NO: 14656 - protein, 5 aa, Homo sapiens
PSQRA

SEQ ID NO: 14657 - protein, 5 aa, Homo sapiens
FISRV

SEQ ID NO: 14658 - protein, 5 aa, Homo sapiens
YLNKI

SEQ ID NO: 14659 - protein, 5 aa, Homo sapiens
GQRQL

SEQ ID NO: 14660 - protein, 5 aa, Homo sapiens
QKPIL

SEQ ID NO: 14661 - protein, 5 aa, Homo sapiens
AYRVV

SEQ ID NO: 14662 - protein, 5 aa, Homo sapiens
FSQED

SEQ ID NO: 14663 - protein, 5 aa, Homo sapiens
NKCAL

SEQ ID NO: 14664 - protein, 5 aa, Homo sapiens
QVSLQ

SEQ ID NO: 14665 - protein, 5 aa, Homo sapiens
WDVDG

SEQ ID NO: 14666 - protein, 5 aa, Homo sapiens
SPAFF

SEQ ID NO: 14667 - protein, 5 aa, Homo sapiens
KKKKV

SEQ ID NO: 14668 - protein, 5 aa, Homo sapiens
IRINP

SEQ ID NO: 14669 - protein, 5 aa, Homo sapiens
TLLES

SEQ ID NO: 14670 - protein, 5 aa, Homo sapiens
DHFDK

SEQ ID NO: 14671 - protein, 5 aa, Homo sapiens
IKKIV

SEQ ID NO: 14672 - protein, 5 aa, Homo sapiens
SLSPT

SEQ ID NO: 14673 - protein, 5 aa, Homo sapiens
KMKAQ

SEQ ID NO: 14674 - protein, 5 aa, Homo sapiens
TYKLK

SEQ ID NO: 14675 - protein, 5 aa, Homo sapiens
ETLQM

SEQ ID NO: 14676 - protein, 5 aa, Homo sapiens
ELLNA

SEQ ID NO: 14677 - protein, 5 aa, Homo sapiens
QNRTR

SEQ ID NO: 14678 - protein, 5 aa, Homo sapiens
SLCSC

SEQ ID NO: 14679 - protein, 5 aa, Homo sapiens
DQFLQ

SEQ ID NO: 14680 - protein, 5 aa, Homo sapiens
ALLLL

SEQ ID NO: 14681 - protein, 5 aa, Homo sapiens
QRINR

SEQ ID NO: 14682 - protein, 5 aa, Homo sapiens
WGAQP

SEQ ID NO: 14683 - protein, 5 aa, Homo sapiens
GRLNW

SEQ ID NO: 14684 - protein, 5 aa, Homo sapiens
PDCPG

SEQ ID NO: 14685 - protein, 5 aa, Homo sapiens
GDDSD

SEQ ID NO: 14686 - protein, 5 aa, Homo sapiens
RQRSK

SEQ ID NO: 14687 - protein, 5 aa, Homo sapiens
SRSGK

SEQ ID NO: 14688 - protein, 5 aa, Homo sapiens
TRVTH

SEQ ID NO: 14689 - protein, 5 aa, Homo sapiens
NYKPY

SEQ ID NO: 14690 - protein, 5 aa, Homo sapiens
LRWGS

SEQ ID NO: 14691 - protein, 5 aa, Homo sapiens
DDSYI

SEQ ID NO: 14692 - protein, 5 aa, Homo sapiens
TGKKK

SEQ ID NO: 14693 - protein, 5 aa, Homo sapiens
LLKQR

SEQ ID NO: 14694 - protein, 5 aa, Homo sapiens
SLKED

SEQ ID NO: 14695 - protein, 5 aa, Homo sapiens
LGELQ

SEQ ID NO: 14696 - protein, 5 aa, Homo sapiens
QGSVL

SEQ ID NO: 14697 - protein, 5 aa, Homo sapiens
PFFPS

SEQ ID NO: 14698 - protein, 5 aa, Homo sapiens
CYSYS

SEQ ID NO: 14699 - protein, 5 aa, Homo sapiens
VSPMH

SEQ ID NO: 14700 - protein, 5 aa, Homo sapiens
NKDVA

SEQ ID NO: 14701 - protein, 5 aa, Homo sapiens
ECDGL

SEQ ID NO: 14702 - protein, 5 aa, Homo sapiens
QEHVE

SEQ ID NO: 14703 - protein, 5 aa, Homo sapiens
VCFLG

SEQ ID NO: 14704 - protein, 5 aa, Homo sapiens
ASLWA

SEQ ID NO: 14705 - protein, 5 aa, Homo sapiens
QAGEV

SEQ ID NO: 14706 - protein, 5 aa, Homo sapiens
EWVCI

SEQ ID NO: 14707 - protein, 5 aa, Homo sapiens
YIKGF

SEQ ID NO: 14708 - protein, 5 aa, Homo sapiens
FLKRP

SEQ ID NO: 14709 - protein, 5 aa, Homo sapiens
SETSL

SEQ ID NO: 14710 - protein, 5 aa, Homo sapiens
LEGVD

SEQ ID NO: 14711 - protein, 5 aa, Homo sapiens
YENQV

SEQ ID NO: 14712 - protein, 5 aa, Homo sapiens
VGIPI

SEQ ID NO: 14713 - protein, 5 aa, Homo sapiens
SKRPF

SEQ ID NO: 14714 - protein, 5 aa, Homo sapiens
SLLWG

SEQ ID NO: 14715 - protein, 5 aa, Homo sapiens
PGHVD

SEQ ID NO: 14716 - protein, 5 aa, Homo sapiens
TRELT

SEQ ID NO: 14717 - protein, 5 aa, Homo sapiens
CGQLE

SEQ ID NO: 14718 - protein, 5 aa, Homo sapiens
DFRKM

SEQ ID NO: 14719 - protein, 5 aa, Homo sapiens
LKNGT

SEQ ID NO: 14720 - protein, 5 aa, Homo sapiens
SVKWN

SEQ ID NO: 14721 - protein, 5 aa, Homo sapiens
STGEK

SEQ ID NO: 14722 - protein, 5 aa, Homo sapiens
PVHIK

SEQ ID NO: 14723 - protein, 5 aa, Homo sapiens
RRAEM

SEQ ID NO: 14724 - protein, 5 aa, Homo sapiens
PYSAE

SEQ ID NO: 14725 - protein, 5 aa, Homo sapiens
GDNQE

SEQ ID NO: 14726 - protein, 5 aa, Homo sapiens
WKMVP

SEQ ID NO: 14727 - protein, 5 aa, Homo sapiens
VFPSD

SEQ ID NO: 14728 - protein, 5 aa, Homo sapiens
RDRPG

SEQ ID NO: 14729 - protein, 5 aa, Homo sapiens
LTLKG

SEQ ID NO: 14730 - protein, 5 aa, Homo sapiens
KYDPS

SEQ ID NO: 14731 - protein, 5 aa, Homo sapiens
RSPYK

SEQ ID NO: 14732 - protein, 5 aa, Homo sapiens
PPKKR

SEQ ID NO: 14733 - protein, 5 aa, Homo sapiens
AANWS

SEQ ID NO: 14734 - protein, 5 aa, Homo sapiens
AMEVE

SEQ ID NO: 14735 - protein, 5 aa, Homo sapiens
SSSFA

SEQ ID NO: 14736 - protein, 5 aa, Homo sapiens
PIDST

SEQ ID NO: 14737 - protein, 5 aa, Homo sapiens
LPEGV

SEQ ID NO: 14738 - protein, 5 aa, Homo sapiens
LLANL

SEQ ID NO: 14739 - protein, 5 aa, Homo sapiens
RRFSV

SEQ ID NO: 14740 - protein, 5 aa, Homo sapiens
HQSPE

SEQ ID NO: 14741 - protein, 5 aa, Homo sapiens
LCSQT

SEQ ID NO: 14742 - protein, 5 aa, Homo sapiens
RKGFP

SEQ ID NO: 14743 - protein, 5 aa, Homo sapiens
NLLTL

SEQ ID NO: 14744 - protein, 5 aa, Homo sapiens
TIDMS

SEQ ID NO: 14745 - protein, 5 aa, Homo sapiens
LRLCT

SEQ ID NO: 14746 - protein, 5 aa, Homo sapiens
SEWII

SEQ ID NO: 14747 - protein, 5 aa, Homo sapiens
LLEEL

SEQ ID NO: 14748 - protein, 5 aa, Homo sapiens
RMQGA

SEQ ID NO: 14749 - protein, 5 aa, Homo sapiens
MTAVA

SEQ ID NO: 14750 - protein, 5 aa, Homo sapiens
QVFES

SEQ ID NO: 14751 - protein, 5 aa, Homo sapiens
MFEKD

SEQ ID NO: 14752 - protein, 5 aa, Homo sapiens
SIMHI

SEQ ID NO: 14753 - protein, 5 aa, Homo sapiens
NITII

SEQ ID NO: 14754 - protein, 5 aa, Homo sapiens
KSWWK

SEQ ID NO: 14755 - protein, 5 aa, Homo sapiens
ADDPV

SEQ ID NO: 14756 - protein, 5 aa, Homo sapiens
DSKPY

SEQ ID NO: 14757 - protein, 5 aa, Homo sapiens
VSLSV

SEQ ID NO: 14758 - protein, 5 aa, Homo sapiens
EEERE

SEQ ID NO: 14759 - protein, 5 aa, Homo sapiens
MNQLG

SEQ ID NO: 14760 - protein, 5 aa, Homo sapiens
CVLVA

SEQ ID NO: 14761 - protein, 5 aa, Homo sapiens
ASFSF

SEQ ID NO: 14762 - protein, 5 aa, Homo sapiens
SYCIR

SEQ ID NO: 14763 - protein, 5 aa, Homo sapiens
CFMPN

SEQ ID NO: 14764 - protein, 5 aa, Homo sapiens
WKSDC

SEQ ID NO: 14765 - protein, 5 aa, Homo sapiens
EKNIG

SEQ ID NO: 14766 - protein, 5 aa, Homo sapiens
IFHYI

SEQ ID NO: 14767 - protein, 5 aa, Homo sapiens
RLLTS

SEQ ID NO: 14768 - protein, 5 aa, Homo sapiens
GAGVS

SEQ ID NO: 14769 - protein, 5 aa, Homo sapiens
RHGEV

SEQ ID NO: 14770 - protein, 5 aa, Homo sapiens
SNYRT

SEQ ID NO: 14771 - protein, 5 aa, Homo sapiens
LDVLG

SEQ ID NO: 14772 - protein, 5 aa, Homo sapiens
RMEAS

SEQ ID NO: 14773 - protein, 5 aa, Homo sapiens
ELYYQ

SEQ ID NO: 14774 - protein, 5 aa, Homo sapiens
VTLVA

SEQ ID NO: 14775 - protein, 5 aa, Homo sapiens
PPKDR

SEQ ID NO: 14776 - protein, 5 aa, Homo sapiens
NIGSL

SEQ ID NO: 14777 - protein, 5 aa, Homo sapiens
WEWGK

SEQ ID NO: 14778 - protein, 5 aa, Homo sapiens
APGTL

SEQ ID NO: 14779 - protein, 5 aa, Homo sapiens
YSYFK

SEQ ID NO: 14780 - protein, 5 aa, Homo sapiens
SSFLV

SEQ ID NO: 14781 - protein, 5 aa, Homo sapiens
HHPAV

SEQ ID NO: 14782 - protein, 5 aa, Homo sapiens
QELWK

SEQ ID NO: 14783 - protein, 5 aa, Homo sapiens
LETAQ

SEQ ID NO: 14784 - protein, 5 aa, Homo sapiens
AVATT

SEQ ID NO: 14785 - protein, 5 aa, Homo sapiens
SATWK

SEQ ID NO: 14786 - protein, 5 aa, Homo sapiens
YANFK

SEQ ID NO: 14787 - protein, 5 aa, Homo sapiens
GLSRT

SEQ ID NO: 14788 - protein, 5 aa, Homo sapiens
PCFQR

SEQ ID NO: 14789 - protein, 5 aa, Homo sapiens
VDETE

SEQ ID NO: 14790 - protein, 5 aa, Homo sapiens
KAKGK

SEQ ID NO: 14791 - protein, 5 aa, Homo sapiens
STTRV

SEQ ID NO: 14792 - protein, 5 aa, Homo sapiens
RGKNV

SEQ ID NO: 14793 - protein, 5 aa, Homo sapiens
LPKCL

SEQ ID NO: 14794 - protein, 5 aa, Homo sapiens
RLSSQ

SEQ ID NO: 14795 - protein, 5 aa, Homo sapiens
HSEIL

SEQ ID NO: 14796 - protein, 5 aa, Homo sapiens
SWFER

SEQ ID NO: 14797 - protein, 5 aa, Homo sapiens
CHSDT

SEQ ID NO: 14798 - protein, 5 aa, Homo sapiens
LGVYK

SEQ ID NO: 14799 - protein, 5 aa, Homo sapiens
MTAAV

SEQ ID NO: 14800 - protein, 5 aa, Homo sapiens
HATVI

SEQ ID NO: 14801 - protein, 5 aa, Homo sapiens
LVPTS

SEQ ID NO: 14802 - protein, 5 aa, Homo sapiens
ILTSP

SEQ ID NO: 14803 - protein, 5 aa, Homo sapiens
PPKPF

SEQ ID NO: 14804 - protein, 5 aa, Homo sapiens
AAHTV

SEQ ID NO: 14805 - protein, 5 aa, Homo sapiens
FCVGK

SEQ ID NO: 14806 - protein, 5 aa, Homo sapiens
LIAIR

SEQ ID NO: 14807 - protein, 5 aa, Homo sapiens
MSGIR

SEQ ID NO: 14808 - protein, 5 aa, Homo sapiens
KNPTK

SEQ ID NO: 14809 - protein, 5 aa, Homo sapiens
VNYLV

SEQ ID NO: 14810 - protein, 5 aa, Homo sapiens
MDSTL

SEQ ID NO: 14811 - protein, 5 aa, Homo sapiens
TGAQG

SEQ ID NO: 14812 - protein, 5 aa, Homo sapiens
QLPVS

SEQ ID NO: 14813 - protein, 5 aa, Homo sapiens
KVKNM

SEQ ID NO: 14814 - protein, 5 aa, Homo sapiens
PLLDR

SEQ ID NO: 14815 - protein, 5 aa, Homo sapiens
LSLKT

SEQ ID NO: 14816 - protein, 5 aa, Homo sapiens
MAQLH

SEQ ID NO: 14817 - protein, 5 aa, Homo sapiens
HITKP

SEQ ID NO: 14818 - protein, 5 aa, Homo sapiens
FYKCE

SEQ ID NO: 14819 - protein, 5 aa, Homo sapiens
TLTPC

SEQ ID NO: 14820 - protein, 5 aa, Homo sapiens
LLDQF

SEQ ID NO: 14821 - protein, 5 aa, Homo sapiens
TDEDD

SEQ ID NO: 14822 - protein, 5 aa, Homo sapiens
ISGVP

SEQ ID NO: 14823 - protein, 5 aa, Homo sapiens
ILSTT

SEQ ID NO: 14824 - protein, 5 aa, Homo sapiens
KLEKR

SEQ ID NO: 14825 - protein, 5 aa, Homo sapiens
KMKPK

SEQ ID NO: 14826 - protein, 5 aa, Homo sapiens
QDFNC

SEQ ID NO: 14827 - protein, 5 aa, Homo sapiens
YIGWC

SEQ ID NO: 14828 - protein, 5 aa, Homo sapiens
QRPPH

SEQ ID NO: 14829 - protein, 5 aa, Homo sapiens
TIHEE

SEQ ID NO: 14830 - protein, 5 aa, Homo sapiens
LKAQP

SEQ ID NO: 14831 - protein, 5 aa, Homo sapiens
SRKKI

SEQ ID NO: 14832 - protein, 5 aa, Homo sapiens
DHSVV

SEQ ID NO: 14833 - protein, 5 aa, Homo sapiens
RQRSK

SEQ ID NO: 14834 - protein, 5 aa, Homo sapiens
LSPRP

SEQ ID NO: 14835 - protein, 5 aa, Homo sapiens
PLEGW

SEQ ID NO: 14836 - protein, 5 aa, Homo sapiens
DDLYG

SEQ ID NO: 14837 - protein, 5 aa, Homo sapiens
EKAAC

SEQ ID NO: 14838 - protein, 5 aa, Homo sapiens
LPVYR

SEQ ID NO: 14839 - protein, 5 aa, Homo sapiens
VLLPK

SEQ ID NO: 14840 - protein, 5 aa, Homo sapiens
QGPLD

SEQ ID NO: 14841 - protein, 5 aa, Homo sapiens
FYCQN

SEQ ID NO: 14842 - protein, 5 aa, Homo sapiens
GRKRK

SEQ ID NO: 14843 - protein, 5 aa, Homo sapiens
TPSLP

SEQ ID NO: 14844 - protein, 5 aa, Homo sapiens
EQEEA

SEQ ID NO: 14845 - protein, 5 aa, Homo sapiens
STIKP

SEQ ID NO: 14846 - protein, 5 aa, Homo sapiens
QDASS

SEQ ID NO: 14847 - protein, 5 aa, Homo sapiens
PPRCL

SEQ ID NO: 14848 - protein, 5 aa, Homo sapiens
RIQAI

SEQ ID NO: 14849 - protein, 5 aa, Homo sapiens
ETTSQ

SEQ ID NO: 14850 - protein, 5 aa, Homo sapiens
FQIFI

SEQ ID NO: 14851 - protein, 5 aa, Homo sapiens
RRKSK

SEQ ID NO: 14852 - protein, 5 aa, Homo sapiens
FGPGS

SEQ ID NO: 14853 - protein, 5 aa, Homo sapiens
LNTTK

SEQ ID NO: 14854 - protein, 5 aa, Homo sapiens
LAQQF

SEQ ID NO: 14855 - protein, 5 aa, Homo sapiens
LNSER

SEQ ID NO: 14856 - protein, 5 aa, Homo sapiens
PSDHS

SEQ ID NO: 14857 - protein, 5 aa, Homo sapiens
KTCLD

SEQ ID NO: 14858 - protein, 5 aa, Homo sapiens
LEKEK

SEQ ID NO: 14859 - protein, 5 aa, Homo sapiens
TFLNS

SEQ ID NO: 14860 - protein, 5 aa, Homo sapiens
TSMGL

SEQ ID NO: 14861 - protein, 5 aa, Homo sapiens
TTVTP

SEQ ID NO: 14862 - protein, 5 aa, Homo sapiens
QKPDQ

SEQ ID NO: 14863 - protein, 5 aa, Homo sapiens
LLLSL

SEQ ID NO: 14864 - protein, 5 aa, Homo sapiens
CCVIS

SEQ ID NO: 14865 - protein, 5 aa, Homo sapiens
PYLSR

SEQ ID NO: 14866 - protein, 5 aa, Homo sapiens
FPAAP

SEQ ID NO: 14867 - protein, 5 aa, Homo sapiens
VFQQQ

SEQ ID NO: 14868 - protein, 5 aa, Homo sapiens
NEKST

SEQ ID NO: 14869 - protein, 5 aa, Homo sapiens
VVCNT

SEQ ID NO: 14870 - protein, 5 aa, Homo sapiens
ATFQL

SEQ ID NO: 14871 - protein, 5 aa, Homo sapiens
LILGD

SEQ ID NO: 14872 - protein, 5 aa, Homo sapiens
RVLTN

SEQ ID NO: 14873 - protein, 5 aa, Homo sapiens
TSSSV

SEQ ID NO: 14874 - protein, 5 aa, Homo sapiens
ADLDP

SEQ ID NO: 14875 - protein, 5 aa, Homo sapiens
AVSSA

SEQ ID NO: 14876 - protein, 5 aa, Homo sapiens
RHSGE

SEQ ID NO: 14877 - protein, 5 aa, Homo sapiens
MTLLF

SEQ ID NO: 14878 - protein, 5 aa, Homo sapiens
VFPSK

SEQ ID NO: 14879 - protein, 5 aa, Homo sapiens
APQRL

SEQ ID NO: 14880 - protein, 5 aa, Homo sapiens
FTQSR

SEQ ID NO: 14881 - protein, 5 aa, Homo sapiens
HERSG

SEQ ID NO: 14882 - protein, 5 aa, Homo sapiens
LQNIH

SEQ ID NO: 14883 - protein, 5 aa, Homo sapiens
LDSRC

SEQ ID NO: 14884 - protein, 5 aa, Homo sapiens
MRMPL

SEQ ID NO: 14885 - protein, 5 aa, Homo sapiens
AGRPV

SEQ ID NO: 14886 - protein, 5 aa, Homo sapiens
CKHKL

SEQ ID NO: 14887 - protein, 5 aa, Homo sapiens
AKISK

SEQ ID NO: 14888 - protein, 5 aa, Homo sapiens
ENGNL

SEQ ID NO: 14889 - protein, 5 aa, Homo sapiens
KEDYR

SEQ ID NO: 14890 - protein, 5 aa, Homo sapiens
STISN

SEQ ID NO: 14891 - protein, 5 aa, Homo sapiens
VGSDP

SEQ ID NO: 14892 - protein, 5 aa, Homo sapiens
PRRRR

SEQ ID NO: 14893 - protein, 5 aa, Homo sapiens
KLLEA

SEQ ID NO: 14894 - protein, 5 aa, Homo sapiens
KAKGK

SEQ ID NO: 14895 - protein, 5 aa, Homo sapiens
EKHSA

SEQ ID NO: 14896 - protein, 5 aa, Homo sapiens
PEFQL

SEQ ID NO: 14897 - protein, 5 aa, Homo sapiens
VFGKS

SEQ ID NO: 14898 - protein, 5 aa, Homo sapiens
LSLPH

SEQ ID NO: 14899 - protein, 5 aa, Homo sapiens
FWFGA

SEQ ID NO: 14900 - protein, 5 aa, Homo sapiens
LEDNK

SEQ ID NO: 14901 - protein, 5 aa, Homo sapiens
YTSSK

SEQ ID NO: 14902 - protein, 5 aa, Homo sapiens
LGCCR

SEQ ID NO: 14903 - protein, 5 aa, Homo sapiens
KQHKA

SEQ ID NO: 14904 - protein, 5 aa, Homo sapiens
LSLRL

SEQ ID NO: 14905 - protein, 5 aa, Homo sapiens
QPSSL

SEQ ID NO: 14906 - protein, 5 aa, Homo sapiens
EDRPV

SEQ ID NO: 14907 - protein, 5 aa, Homo sapiens
MIGSM

SEQ ID NO: 14908 - protein, 5 aa, Homo sapiens
TVLEK

SEQ ID NO: 14909 - protein, 5 aa, Homo sapiens
LIWIF

SEQ ID NO: 14910 - protein, 5 aa, Homo sapiens
PVTPS

SEQ ID NO: 14911 - protein, 5 aa, Homo sapiens
WRWQC

SEQ ID NO: 14912 - protein, 5 aa, Homo sapiens
GKLLL

SEQ ID NO: 14913 - protein, 5 aa, Homo sapiens
SSGGS

SEQ ID NO: 14914 - protein, 5 aa, Homo sapiens
APATT

SEQ ID NO: 14915 - protein, 5 aa, Homo sapiens
ISAAS

SEQ ID NO: 14916 - protein, 5 aa, Homo sapiens
ESLRR

SEQ ID NO: 14917 - protein, 5 aa, Homo sapiens
PPKSK

SEQ ID NO: 14918 - protein, 5 aa, Homo sapiens
ELEIS

SEQ ID NO: 14919 - protein, 5 aa, Homo sapiens
QYSFV

SEQ ID NO: 14920 - protein, 5 aa, Homo sapiens
SSDLR

SEQ ID NO: 14921 - protein, 5 aa, Homo sapiens
NSAAQ

SEQ ID NO: 14922 - protein, 5 aa, Homo sapiens
LGHEV

SEQ ID NO: 14923 - protein, 5 aa, Homo sapiens
DAEDY

SEQ ID NO: 14924 - protein, 5 aa, Homo sapiens
HSCVH

SEQ ID NO: 14925 - protein, 5 aa, Homo sapiens
RGERA

SEQ ID NO: 14926 - protein, 5 aa, Homo sapiens
CLSPR

SEQ ID NO: 14927 - protein, 5 aa, Homo sapiens
KHFQD

SEQ ID NO: 14928 - protein, 5 aa, Homo sapiens
SHCLC

SEQ ID NO: 14929 - protein, 5 aa, Homo sapiens
RKFLN

SEQ ID NO: 14930 - protein, 5 aa, Homo sapiens
VKPVG

SEQ ID NO: 14931 - protein, 5 aa, Homo sapiens
FVKGL

SEQ ID NO: 14932 - protein, 5 aa, Homo sapiens
NKDVA

SEQ ID NO: 14933 - protein, 5 aa, Homo sapiens
GVEFC

SEQ ID NO: 14934 - protein, 5 aa, Homo sapiens
ETEEL

SEQ ID NO: 14935 - protein, 5 aa, Homo sapiens
RPRRV

SEQ ID NO: 14936 - protein, 5 aa, Homo sapiens
TSHCT

SEQ ID NO: 14937 - protein, 5 aa, Homo sapiens
WISSN

SEQ ID NO: 14938 - protein, 5 aa, Homo sapiens
NWAPP

SEQ ID NO: 14939 - protein, 5 aa, Homo sapiens
KVTDL

SEQ ID NO: 14940 - protein, 5 aa, Homo sapiens
WSLSW

SEQ ID NO: 14941 - protein, 5 aa, Homo sapiens
AGRPV

SEQ ID NO: 14942 - protein, 5 aa, Homo sapiens
CIPLG

SEQ ID NO: 14943 - protein, 5 aa, Homo sapiens
SRWDS

SEQ ID NO: 14944 - protein, 5 aa, Homo sapiens
VPYNK

SEQ ID NO: 14945 - protein, 5 aa, Homo sapiens
ECPAS

SEQ ID NO: 14946 - protein, 5 aa, Homo sapiens
PNEKR

SEQ ID NO: 14947 - protein, 5 aa, Homo sapiens
LVVGL

SEQ ID NO: 14948 - protein, 5 aa, Homo sapiens
SKFYS

SEQ ID NO: 14949 - protein, 5 aa, Homo sapiens
WEYQI

SEQ ID NO: 14950 - protein, 5 aa, Homo sapiens
ITCYI

SEQ ID NO: 14951 - protein, 5 aa, Homo sapiens
GDTSL

SEQ ID NO: 14952 - protein, 5 aa, Homo sapiens
KYEIL

SEQ ID NO: 14953 - protein, 5 aa, Homo sapiens
HILTA

SEQ ID NO: 14954 - protein, 5 aa, Homo sapiens
RWLSD

SEQ ID NO: 14955 - protein, 5 aa, Homo sapiens
RSLDR

SEQ ID NO: 14956 - protein, 5 aa, Homo sapiens
LHRYH

SEQ ID NO: 14957 - protein, 5 aa, Homo sapiens
SIVSS

SEQ ID NO: 14958 - protein, 5 aa, Homo sapiens
ICSDV

SEQ ID NO: 14959 - protein, 5 aa, Homo sapiens
PQPLT

SEQ ID NO: 14960 - protein, 5 aa, Homo sapiens
VDWLE

SEQ ID NO: 14961 - protein, 5 aa, Homo sapiens
GLTPS

SEQ ID NO: 14962 - protein, 5 aa, Homo sapiens
GMGSS

SEQ ID NO: 14963 - protein, 5 aa, Homo sapiens
YPFQI

SEQ ID NO: 14964 - protein, 5 aa, Homo sapiens
YTSSK

SEQ ID NO: 14965 - protein, 5 aa, Homo sapiens
PQPPE

SEQ ID NO: 14966 - protein, 5 aa, Homo sapiens
EKPYE

SEQ ID NO: 14967 - protein, 5 aa, Homo sapiens
GLLKE

SEQ ID NO: 14968 - protein, 5 aa, Homo sapiens
RPNGL

SEQ ID NO: 14969 - protein, 5 aa, Homo sapiens
CKRNN

SEQ ID NO: 14970 - protein, 5 aa, Homo sapiens
VLFEK

SEQ ID NO: 14971 - protein, 5 aa, Homo sapiens
WSYSL

SEQ ID NO: 14972 - protein, 5 aa, Homo sapiens
QSERG

SEQ ID NO: 14973 - protein, 5 aa, Homo sapiens
KKKVK

SEQ ID NO: 14974 - protein, 5 aa, Homo sapiens
STRAS

SEQ ID NO: 14975 - protein, 5 aa, Homo sapiens
TSITY

SEQ ID NO: 14976 - protein, 5 aa, Homo sapiens
APCQS

SEQ ID NO: 14977 - protein, 5 aa, Homo sapiens
DSRHW

SEQ ID NO: 14978 - protein, 5 aa, Homo sapiens
DDWES

SEQ ID NO: 14979 - protein, 5 aa, Homo sapiens
EWEVI

SEQ ID NO: 14980 - protein, 5 aa, Homo sapiens
VWRPY

SEQ ID NO: 14981 - protein, 5 aa, Homo sapiens
EAAKD

SEQ ID NO: 14982 - protein, 5 aa, Homo sapiens
AAARS

SEQ ID NO: 14983 - protein, 5 aa, Homo sapiens
SPKGT

SEQ ID NO: 14984 - protein, 5 aa, Homo sapiens
LLPTP

SEQ ID NO: 14985 - protein, 5 aa, Homo sapiens
LRKRK

SEQ ID NO: 14986 - protein, 5 aa, Homo sapiens
DMFKK

SEQ ID NO: 14987 - protein, 5 aa, Homo sapiens
RKIPP

SEQ ID NO: 14988 - protein, 5 aa, Homo sapiens
DCECY

SEQ ID NO: 14989 - protein, 5 aa, Homo sapiens
LELKQ

SEQ ID NO: 14990 - protein, 5 aa, Homo sapiens
PMIKQ

SEQ ID NO: 14991 - protein, 5 aa, Homo sapiens
RTAMQ

SEQ ID NO: 14992 - protein, 5 aa, Homo sapiens
FNAEY

SEQ ID NO: 14993 - protein, 5 aa, Homo sapiens
LESFW

SEQ ID NO: 14994 - protein, 5 aa, Homo sapiens
AHFRD

SEQ ID NO: 14995 - protein, 5 aa, Homo sapiens
VPKSN

SEQ ID NO: 14996 - protein, 5 aa, Homo sapiens
EPLLT

SEQ ID NO: 14997 - protein, 5 aa, Homo sapiens
YVIRI

SEQ ID NO: 14998 - protein, 5 aa, Homo sapiens
MNQEK

SEQ ID NO: 14999 - protein, 5 aa, Homo sapiens
CYRQH

SEQ ID NO: 15000 - protein, 5 aa, Homo sapiens
EDQLS

SEQ ID NO: 15001 - protein, 5 aa, Homo sapiens
KTHKA

SEQ ID NO: 15002 - protein, 5 aa, Homo sapiens
RERFG

SEQ ID NO: 15003 - protein, 5 aa, Homo sapiens
DTNGL

SEQ ID NO: 15004 - protein, 5 aa, Homo sapiens
SSKIF

SEQ ID NO: 15005 - protein, 5 aa, Homo sapiens
KAKGK

SEQ ID NO: 15006 - protein, 5 aa, Homo sapiens
AISGC

SEQ ID NO: 15007 - protein, 5 aa, Homo sapiens
FDIQF

SEQ ID NO: 15008 - protein, 5 aa, Homo sapiens
VSLTA

SEQ ID NO: 15009 - protein, 5 aa, Homo sapiens
NVQTV

SEQ ID NO: 15010 - protein, 5 aa, Homo sapiens
LELLS

SEQ ID NO: 15011 - protein, 5 aa, Homo sapiens
KLVLG

SEQ ID NO: 15012 - protein, 5 aa, Homo sapiens
SDPGV

SEQ ID NO: 15013 - protein, 5 aa, Homo sapiens
PHFKH

SEQ ID NO: 15014 - protein, 5 aa, Homo sapiens
LQSRN

SEQ ID NO: 15015 - protein, 5 aa, Homo sapiens
GKAKH

SEQ ID NO: 15016 - protein, 5 aa, Homo sapiens
DDEDE

SEQ ID NO: 15017 - protein, 5 aa, Homo sapiens
EPDSD

SEQ ID NO: 15018 - protein, 5 aa, Homo sapiens
PRGPV

SEQ ID NO: 15019 - protein, 5 aa, Homo sapiens
SAASS

SEQ ID NO: 15020 - protein, 5 aa, Homo sapiens
DLTGL

SEQ ID NO: 15021 - protein, 5 aa, Homo sapiens
KETHL

SEQ ID NO: 15022 - protein, 5 aa, Homo sapiens
ILQQN

SEQ ID NO: 15023 - protein, 5 aa, Homo sapiens
SDLKF

SEQ ID NO: 15024 - protein, 5 aa, Homo sapiens
STLEG

SEQ ID NO: 15025 - protein, 5 aa, Homo sapiens
KHLLS

SEQ ID NO: 15026 - protein, 5 aa, Homo sapiens
ELKDQ

SEQ ID NO: 15027 - protein, 5 aa, Homo sapiens
IMYIA

SEQ ID NO: 15028 - protein, 5 aa, Homo sapiens
PLQVV

SEQ ID NO: 15029 - protein, 5 aa, Homo sapiens
TTVMY

SEQ ID NO: 15030 - protein, 5 aa, Homo sapiens
EFRSH

SEQ ID NO: 15031 - protein, 5 aa, Homo sapiens
AFLKH

SEQ ID NO: 15032 - protein, 5 aa, Homo sapiens
MELTV

SEQ ID NO: 15033 - protein, 5 aa, Homo sapiens
VAGSD

SEQ ID NO: 15034 - protein, 5 aa, Homo sapiens
SSNII

SEQ ID NO: 15035 - protein, 5 aa, Homo sapiens
GQPMI

SEQ ID NO: 15036 - protein, 5 aa, Homo sapiens
YLLPL

SEQ ID NO: 15037 - protein, 5 aa, Homo sapiens
TGQRR

SEQ ID NO: 15038 - protein, 5 aa, Homo sapiens
HMPQL

SEQ ID NO: 15039 - protein, 5 aa, Homo sapiens
APGAH

SEQ ID NO: 15040 - protein, 5 aa, Homo sapiens
VGPLI

SEQ ID NO: 15041 - protein, 5 aa, Homo sapiens
AFNLS

SEQ ID NO: 15042 - protein, 5 aa, Homo sapiens
PTNTL

SEQ ID NO: 15043 - protein, 5 aa, Homo sapiens
FLIKD

SEQ ID NO: 15044 - protein, 5 aa, Homo sapiens
HYTQQ

SEQ ID NO: 15045 - protein, 5 aa, Homo sapiens
TSHCT

SEQ ID NO: 15046 - protein, 5 aa, Homo sapiens
MTASK

SEQ ID NO: 15047 - protein, 5 aa, Homo sapiens
RRTRC

SEQ ID NO: 15048 - protein, 5 aa, Homo sapiens
KQAAE

SEQ ID NO: 15049 - protein, 5 aa, Homo sapiens
QLTIF

SEQ ID NO: 15050 - protein, 5 aa, Homo sapiens
GERDL

SEQ ID NO: 15051 - protein, 5 aa, Homo sapiens
ETHQK

SEQ ID NO: 15052 - protein, 5 aa, Homo sapiens
KLSSV

SEQ ID NO: 15053 - protein, 5 aa, Homo sapiens
FKSNV

SEQ ID NO: 15054 - protein, 5 aa, Homo sapiens
PTWNI

SEQ ID NO: 15055 - protein, 5 aa, Homo sapiens
RLNSR

SEQ ID NO: 15056 - protein, 5 aa, Homo sapiens
LGFQG

SEQ ID NO: 15057 - protein, 5 aa, Homo sapiens
QNWNV

SEQ ID NO: 15058 - protein, 5 aa, Homo sapiens
SSGVT

SEQ ID NO: 15059 - protein, 5 aa, Homo sapiens
MEEGR

SEQ ID NO: 15060 - protein, 5 aa, Homo sapiens
IMWEQ

SEQ ID NO: 15061 - protein, 5 aa, Homo sapiens
RAHLS

SEQ ID NO: 15062 - protein, 5 aa, Homo sapiens
IGKFD

SEQ ID NO: 15063 - protein, 5 aa, Homo sapiens
SKGQE

SEQ ID NO: 15064 - protein, 5 aa, Homo sapiens
TEGKK

SEQ ID NO: 15065 - protein, 5 aa, Homo sapiens
VETNG

SEQ ID NO: 15066 - protein, 5 aa, Homo sapiens
PDLFI

SEQ ID NO: 15067 - protein, 5 aa, Homo sapiens
PLQIT

SEQ ID NO: 15068 - protein, 5 aa, Homo sapiens
KKFSS

SEQ ID NO: 15069 - protein, 5 aa, Homo sapiens
RRMQQ

SEQ ID NO: 15070 - protein, 5 aa, Homo sapiens
ARKTV

SEQ ID NO: 15071 - protein, 5 aa, Homo sapiens
QMKEI

SEQ ID NO: 15072 - protein, 5 aa, Homo sapiens
WHPWL

SEQ ID NO: 15073 - protein, 5 aa, Homo sapiens
RLVKE

SEQ ID NO: 15074 - protein, 5 aa, Homo sapiens
MHEDT

SEQ ID NO: 15075 - protein, 5 aa, Homo sapiens
DHLGK

SEQ ID NO: 15076 - protein, 5 aa, Homo sapiens
TSPFP

SEQ ID NO: 15077 - protein, 5 aa, Homo sapiens
TMSAH

SEQ ID NO: 15078 - protein, 5 aa, Homo sapiens
PPSDE

SEQ ID NO: 15079 - protein, 5 aa, Homo sapiens
KNKGN

SEQ ID NO: 15080 - protein, 5 aa, Homo sapiens
AGKKA

SEQ ID NO: 15081 - protein, 5 aa, Homo sapiens
GGSCL

SEQ ID NO: 15082 - protein, 5 aa, Homo sapiens
TPQTM

SEQ ID NO: 15083 - protein, 5 aa, Homo sapiens
RRFPD

SEQ ID NO: 15084 - protein, 5 aa, Homo sapiens
FHLLG

SEQ ID NO: 15085 - protein, 5 aa, Homo sapiens
AVLQK

SEQ ID NO: 15086 - protein, 5 aa, Homo sapiens
RPMSC

SEQ ID NO: 15087 - protein, 5 aa, Homo sapiens
KIPQK

SEQ ID NO: 15088 - protein, 5 aa, Homo sapiens
GSPQP

SEQ ID NO: 15089 - protein, 5 aa, Homo sapiens
AFMLV

SEQ ID NO: 15090 - protein, 5 aa, Homo sapiens
HLQQP

SEQ ID NO: 15091 - protein, 5 aa, Homo sapiens
DVIFF

SEQ ID NO: 15092 - protein, 5 aa, Homo sapiens
EMEPN

SEQ ID NO: 15093 - protein, 5 aa, Homo sapiens
EGWEG

SEQ ID NO: 15094 - protein, 5 aa, Homo sapiens
RHGDD

SEQ ID NO: 15095 - protein, 5 aa, Homo sapiens
GSSDA

SEQ ID NO: 15096 - protein, 5 aa, Homo sapiens
LAKEQ

SEQ ID NO: 15097 - protein, 5 aa, Homo sapiens
PQKQD

SEQ ID NO: 15098 - protein, 5 aa, Homo sapiens
SCKNR

SEQ ID NO: 15099 - protein, 5 aa, Homo sapiens
DHYAT

SEQ ID NO: 15100 - protein, 5 aa, Homo sapiens
SQKAK

SEQ ID NO: 15101 - protein, 5 aa, Homo sapiens
AILWL

SEQ ID NO: 15102 - protein, 5 aa, Homo sapiens
KSDGP

SEQ ID NO: 15103 - protein, 5 aa, Homo sapiens
CSGKM

SEQ ID NO: 15104 - protein, 5 aa, Homo sapiens
LDDDQ

SEQ ID NO: 15105 - protein, 5 aa, Homo sapiens
DTESQ

SEQ ID NO: 15106 - protein, 5 aa, Homo sapiens
LGLNN

SEQ ID NO: 15107 - protein, 5 aa, Homo sapiens
RPRQR

SEQ ID NO: 15108 - protein, 5 aa, Homo sapiens
RVHGQ

SEQ ID NO: 15109 - protein, 5 aa, Homo sapiens
PCWAS

SEQ ID NO: 15110 - protein, 5 aa, Homo sapiens
LQTLE

SEQ ID NO: 15111 - protein, 5 aa, Homo sapiens
LCQLS

SEQ ID NO: 15112 - protein, 5 aa, Homo sapiens
YTSSK

SEQ ID NO: 15113 - protein, 5 aa, Homo sapiens
RERPK

SEQ ID NO: 15114 - protein, 5 aa, Homo sapiens
SVGGS

SEQ ID NO: 15115 - protein, 5 aa, Homo sapiens
VCFRP

SEQ ID NO: 15116 - protein, 5 aa, Homo sapiens
VHEEF

SEQ ID NO: 15117 - protein, 5 aa, Homo sapiens
NGNEL

SEQ ID NO: 15118 - protein, 5 aa, Homo sapiens
TGFLS

SEQ ID NO: 15119 - protein, 5 aa, Homo sapiens
GTASA

SEQ ID NO: 15120 - protein, 5 aa, Homo sapiens
VNQGT

SEQ ID NO: 15121 - protein, 5 aa, Homo sapiens
GPNEG

SEQ ID NO: 15122 - protein, 5 aa, Homo sapiens
PALAP

SEQ ID NO: 15123 - protein, 5 aa, Homo sapiens
AGLWS

SEQ ID NO: 15124 - protein, 5 aa, Homo sapiens
QKYGL

SEQ ID NO: 15125 - protein, 5 aa, Homo sapiens
GVVPL

SEQ ID NO: 15126 - protein, 5 aa, Homo sapiens
SGPES

SEQ ID NO: 15127 - protein, 5 aa, Homo sapiens
PRRRR

SEQ ID NO: 15128 - protein, 5 aa, Homo sapiens
RPLSP

SEQ ID NO: 15129 - protein, 5 aa, Homo sapiens
ETEKN

SEQ ID NO: 15130 - protein, 5 aa, Homo sapiens
VPSSI

SEQ ID NO: 15131 - protein, 5 aa, Homo sapiens
RSPDT

SEQ ID NO: 15132 - protein, 5 aa, Homo sapiens
MAIKS

SEQ ID NO: 15133 - protein, 5 aa, Homo sapiens
KKDRR

SEQ ID NO: 15134 - protein, 5 aa, Homo sapiens
DSDSD

SEQ ID NO: 15135 - protein, 5 aa, Homo sapiens
SGGCC

SEQ ID NO: 15136 - protein, 5 aa, Homo sapiens
AADVQ

SEQ ID NO: 15137 - protein, 5 aa, Homo sapiens
LTSTE

SEQ ID NO: 15138 - protein, 5 aa, Homo sapiens
IDNEF

SEQ ID NO: 15139 - protein, 5 aa, Homo sapiens
DGAAP

SEQ ID NO: 15140 - protein, 5 aa, Homo sapiens
EQARK

SEQ ID NO: 15141 - protein, 5 aa, Homo sapiens
PTLLE

SEQ ID NO: 15142 - protein, 5 aa, Homo sapiens
KAKTT

SEQ ID NO: 15143 - protein, 5 aa, Homo sapiens
VSPRV

SEQ ID NO: 15144 - protein, 5 aa, Homo sapiens
VIRKT

SEQ ID NO: 15145 - protein, 5 aa, Homo sapiens
SFLTF

SEQ ID NO: 15146 - protein, 5 aa, Homo sapiens
NELYS

SEQ ID NO: 15147 - protein, 5 aa, Homo sapiens
KEKKN

SEQ ID NO: 15148 - protein, 5 aa, Homo sapiens
MACLT

SEQ ID NO: 15149 - protein, 5 aa, Homo sapiens
ACAQP

SEQ ID NO: 15150 - protein, 5 aa, Homo sapiens
PLGGP

SEQ ID NO: 15151 - protein, 5 aa, Homo sapiens
DQVCT

SEQ ID NO: 15152 - protein, 5 aa, Homo sapiens
STPKR

SEQ ID NO: 15153 - protein, 5 aa, Homo sapiens
RNHII

SEQ ID NO: 15154 - protein, 5 aa, Homo sapiens
DSDLE

SEQ ID NO: 15155 - protein, 5 aa, Homo sapiens
THWSK

SEQ ID NO: 15156 - protein, 5 aa, Homo sapiens
RGCST

SEQ ID NO: 15157 - protein, 5 aa, Homo sapiens
DYYML

SEQ ID NO: 15158 - protein, 5 aa, Homo sapiens
TQKGC

SEQ ID NO: 15159 - protein, 5 aa, Homo sapiens
AGEKS

SEQ ID NO: 15160 - protein, 5 aa, Homo sapiens
EMKIR

SEQ ID NO: 15161 - protein, 5 aa, Homo sapiens
PDTED

SEQ ID NO: 15162 - protein, 5 aa, Homo sapiens
NLYLL

SEQ ID NO: 15163 - protein, 5 aa, Homo sapiens
QSAKE

SEQ ID NO: 15164 - protein, 5 aa, Homo sapiens
LREGQ

SEQ ID NO: 15165 - protein, 5 aa, Homo sapiens
QETSI

SEQ ID NO: 15166 - protein, 5 aa, Homo sapiens
HLQNW

SEQ ID NO: 15167 - protein, 5 aa, Homo sapiens
QESSA

SEQ ID NO: 15168 - protein, 5 aa, Homo sapiens
AQDLY

SEQ ID NO: 15169 - protein, 5 aa, Homo sapiens
IEWEF

SEQ ID NO: 15170 - protein, 5 aa, Homo sapiens
AVATT

SEQ ID NO: 15171 - protein, 5 aa, Homo sapiens
EFESM

SEQ ID NO: 15172 - protein, 5 aa, Homo sapiens
QLQES

SEQ ID NO: 15173 - protein, 5 aa, Homo sapiens
SGEKP

SEQ ID NO: 15174 - protein, 5 aa, Homo sapiens
LETSL

SEQ ID NO: 15175 - protein, 5 aa, Homo sapiens
ISLTV

SEQ ID NO: 15176 - protein, 5 aa, Homo sapiens
DTLPF

SEQ ID NO: 15177 - protein, 5 aa, Homo sapiens
DHEMP

SEQ ID NO: 15178 - protein, 5 aa, Homo sapiens
QCCSN

SEQ ID NO: 15179 - protein, 5 aa, Homo sapiens
EEEEE

SEQ ID NO: 15180 - protein, 5 aa, Homo sapiens
SVRGA

SEQ ID NO: 15181 - protein, 5 aa, Homo sapiens
KKSRI

SEQ ID NO: 15182 - protein, 5 aa, Homo sapiens
RGTLG

SEQ ID NO: 15183 - protein, 5 aa, Homo sapiens
TSVSS

SEQ ID NO: 15184 - protein, 5 aa, Homo sapiens
EPLPF

SEQ ID NO: 15185 - protein, 5 aa, Homo sapiens
SKEYV

SEQ ID NO: 15186 - protein, 5 aa, Homo sapiens
LGCCR

SEQ ID NO: 15187 - protein, 5 aa, Homo sapiens
ETLPL

SEQ ID NO: 15188 - protein, 5 aa, Homo sapiens
FFLKW

SEQ ID NO: 15189 - protein, 5 aa, Homo sapiens
KKIYI

SEQ ID NO: 15190 - protein, 5 aa, Homo sapiens
AKQGL

SEQ ID NO: 15191 - protein, 5 aa, Homo sapiens
GSPVD

SEQ ID NO: 15192 - protein, 5 aa, Homo sapiens
PSLAS

SEQ ID NO: 15193 - protein, 5 aa, Homo sapiens
ELGKE

SEQ ID NO: 15194 - protein, 5 aa, Homo sapiens
SLSTN

SEQ ID NO: 15195 - protein, 5 aa, Homo sapiens
RSERG

SEQ ID NO: 15196 - protein, 5 aa, Homo sapiens
LYPQY

SEQ ID NO: 15197 - protein, 5 aa, Homo sapiens
IQQDM

SEQ ID NO: 15198 - protein, 5 aa, Homo sapiens
SAVAA

SEQ ID NO: 15199 - protein, 5 aa, Homo sapiens
PANNS

SEQ ID NO: 15200 - protein, 5 aa, Homo sapiens
PPKSK

SEQ ID NO: 15201 - protein, 5 aa, Homo sapiens
MKPKF

SEQ ID NO: 15202 - protein, 5 aa, Homo sapiens
NVVNS

SEQ ID NO: 15203 - protein, 5 aa, Homo sapiens
HVRVA

SEQ ID NO: 15204 - protein, 5 aa, Homo sapiens
RWKIC

SEQ ID NO: 15205 - protein, 5 aa, Homo sapiens
TTSVV

SEQ ID NO: 15206 - protein, 5 aa, Homo sapiens
QLMEI

SEQ ID NO: 15207 - protein, 5 aa, Homo sapiens
RGERA

SEQ ID NO: 15208 - protein, 5 aa, Homo sapiens
CCSEA

SEQ ID NO: 15209 - protein, 5 aa, Homo sapiens
SKKSH

SEQ ID NO: 15210 - protein, 5 aa, Homo sapiens
EEDPA

SEQ ID NO: 15211 - protein, 5 aa, Homo sapiens
PPQSE

SEQ ID NO: 15212 - protein, 5 aa, Homo sapiens
FEAGL

SEQ ID NO: 15213 - protein, 5 aa, Homo sapiens
ACTKR

SEQ ID NO: 15214 - protein, 5 aa, Homo sapiens
HKFRD

SEQ ID NO: 15215 - protein, 5 aa, Homo sapiens
VSLTA

SEQ ID NO: 15216 - protein, 5 aa, Homo sapiens
KKIIV

SEQ ID NO: 15217 - protein, 5 aa, Homo sapiens
VFKAP

SEQ ID NO: 15218 - protein, 5 aa, Homo sapiens
YGFGG

SEQ ID NO: 15219 - protein, 5 aa, Homo sapiens
CGCLG

SEQ ID NO: 15220 - protein, 5 aa, Homo sapiens
RKDKK

SEQ ID NO: 15221 - protein, 5 aa, Homo sapiens
SKSSS

SEQ ID NO: 15222 - protein, 5 aa, Homo sapiens
DLPCV

SEQ ID NO: 15223 - protein, 5 aa, Homo sapiens
TYEKV

SEQ ID NO: 15224 - protein, 5 aa, Homo sapiens
CMKNL

SEQ ID NO: 15225 - protein, 5 aa, Homo sapiens
RLRLG

SEQ ID NO: 15226 - protein, 5 aa, Homo sapiens
GGEED

SEQ ID NO: 15227 - protein, 5 aa, Homo sapiens
AAAEQ

SEQ ID NO: 15228 - protein, 5 aa, Homo sapiens
FPRKA

SEQ ID NO: 15229 - protein, 5 aa, Homo sapiens
KCRVW

SEQ ID NO: 15230 - protein, 5 aa, Homo sapiens
HILFV

SEQ ID NO: 15231 - protein, 5 aa, Homo sapiens
VHPSV

SEQ ID NO: 15232 - protein, 5 aa, Homo sapiens
VGVPI

SEQ ID NO: 15233 - protein, 5 aa, Homo sapiens
FVFPG

SEQ ID NO: 15234 - protein, 5 aa, Homo sapiens
PCKVS

SEQ ID NO: 15235 - protein, 5 aa, Homo sapiens
RPTTT

SEQ ID NO: 15236 - protein, 5 aa, Homo sapiens
PSGQA

SEQ ID NO: 15237 - protein, 5 aa, Homo sapiens
KKAHI

SEQ ID NO: 15238 - protein, 5 aa, Homo sapiens
DTKAG

SEQ ID NO: 15239 - protein, 5 aa, Homo sapiens
YKCRT

SEQ ID NO: 15240 - protein, 5 aa, Homo sapiens
FLLFL

SEQ ID NO: 15241 - protein, 5 aa, Homo sapiens
EHIEL

SEQ ID NO: 15242 - protein, 5 aa, Homo sapiens
AFNQP

SEQ ID NO: 15243 - protein, 5 aa, Homo sapiens
STDIF

SEQ ID NO: 15244 - protein, 5 aa, Homo sapiens
CFSLP

SEQ ID NO: 15245 - protein, 5 aa, Homo sapiens
AEMQS

SEQ ID NO: 15246 - protein, 5 aa, Homo sapiens
DCDMS

SEQ ID NO: 15247 - protein, 5 aa, Homo sapiens
YFRDK

SEQ ID NO: 15248 - protein, 5 aa, Homo sapiens
DLDDY

SEQ ID NO: 15249 - protein, 5 aa, Homo sapiens
SCSGL

SEQ ID NO: 15250 - protein, 5 aa, Homo sapiens
QITWQ

SEQ ID NO: 15251 - protein, 5 aa, Homo sapiens
CDFTF

SEQ ID NO: 15252 - protein, 5 aa, Homo sapiens
QALTL

SEQ ID NO: 15253 - protein, 5 aa, Homo sapiens
PLPPL

SEQ ID NO: 15254 - protein, 5 aa, Homo sapiens
LDADF

SEQ ID NO: 15255 - protein, 5 aa, Homo sapiens
KTNEA

SEQ ID NO: 15256 - protein, 5 aa, Homo sapiens
RDLQE

SEQ ID NO: 15257 - protein, 5 aa, Homo sapiens
RGERA

SEQ ID NO: 15258 - protein, 5 aa, Homo sapiens
GEMVG

SEQ ID NO: 15259 - protein, 5 aa, Homo sapiens
VQGGK

SEQ ID NO: 15260 - protein, 5 aa, Homo sapiens
EYKKP

SEQ ID NO: 15261 - protein, 5 aa, Homo sapiens
HLKIK

SEQ ID NO: 15262 - protein, 5 aa, Homo sapiens
WSLVG

SEQ ID NO: 15263 - protein, 5 aa, Homo sapiens
AFKQE

SEQ ID NO: 15264 - protein, 5 aa, Homo sapiens
DAFPQ

SEQ ID NO: 15265 - protein, 5 aa, Homo sapiens
PQTNP

SEQ ID NO: 15266 - protein, 5 aa, Homo sapiens
HREDR

SEQ ID NO: 15267 - protein, 5 aa, Homo sapiens
KLDAN

SEQ ID NO: 15268 - protein, 5 aa, Homo sapiens
SSESL

SEQ ID NO: 15269 - protein, 5 aa, Homo sapiens
LAVER

SEQ ID NO: 15270 - protein, 5 aa, Homo sapiens
LKTQD

SEQ ID NO: 15271 - protein, 5 aa, Homo sapiens
PNSPF

SEQ ID NO: 15272 - protein, 5 aa, Homo sapiens
FLTWL

SEQ ID NO: 15273 - protein, 5 aa, Homo sapiens
QSHHL

SEQ ID NO: 15274 - protein, 5 aa, Homo sapiens
SVNSL

SEQ ID NO: 15275 - protein, 5 aa, Homo sapiens
GQTFG

SEQ ID NO: 15276 - protein, 5 aa, Homo sapiens
KNSSR

SEQ ID NO: 15277 - protein, 5 aa, Homo sapiens
ELEYL

SEQ ID NO: 15278 - protein, 5 aa, Homo sapiens
GTWPG

SEQ ID NO: 15279 - protein, 5 aa, Homo sapiens
LESTL

SEQ ID NO: 15280 - protein, 5 aa, Homo sapiens
KLTRL

SEQ ID NO: 15281 - protein, 5 aa, Homo sapiens
AQEAV

SEQ ID NO: 15282 - protein, 5 aa, Homo sapiens
AGESS

SEQ ID NO: 15283 - protein, 5 aa, Homo sapiens
ARLGR

SEQ ID NO: 15284 - protein, 5 aa, Homo sapiens
VLISD

SEQ ID NO: 15285 - protein, 5 aa, Homo sapiens
MVQVI

SEQ ID NO: 15286 - protein, 5 aa, Homo sapiens
IQRHK

SEQ ID NO: 15287 - protein, 5 aa, Homo sapiens
PEAEK

SEQ ID NO: 15288 - protein, 5 aa, Homo sapiens
QPSDT

SEQ ID NO: 15289 - protein, 5 aa, Homo sapiens
FSLTP

SEQ ID NO: 15290 - protein, 5 aa, Homo sapiens
YKNVE

SEQ ID NO: 15291 - protein, 5 aa, Homo sapiens
EFMAS

SEQ ID NO: 15292 - protein, 5 aa, Homo sapiens
DVFQR

SEQ ID NO: 15293 - protein, 5 aa, Homo sapiens
SGQQV

SEQ ID NO: 15294 - protein, 5 aa, Homo sapiens
QKIFA

SEQ ID NO: 15295 - protein, 5 aa, Homo sapiens
PKAYS

SEQ ID NO: 15296 - protein, 5 aa, Homo sapiens
GSPPP

SEQ ID NO: 15297 - protein, 5 aa, Homo sapiens
PGENL

SEQ ID NO: 15298 - protein, 5 aa, Homo sapiens
TKKDS

SEQ ID NO: 15299 - protein, 5 aa, Homo sapiens
AKRMK

SEQ ID NO: 15300 - protein, 5 aa, Homo sapiens
TEFKK

SEQ ID NO: 15301 - protein, 5 aa, Homo sapiens
NTYHT

SEQ ID NO: 15302 - protein, 5 aa, Homo sapiens
TENSE

SEQ ID NO: 15303 - protein, 5 aa, Homo sapiens
PYNGT

SEQ ID NO: 15304 - protein, 5 aa, Homo sapiens
LPLPA

SEQ ID NO: 15305 - protein, 5 aa, Homo sapiens
ILHTF

SEQ ID NO: 15306 - protein, 5 aa, Homo sapiens
QPKQD

SEQ ID NO: 15307 - protein, 5 aa, Homo sapiens
ETSDQ

SEQ ID NO: 15308 - protein, 5 aa, Homo sapiens
RSLFN

SEQ ID NO: 15309 - protein, 5 aa, Homo sapiens
KEQKT

SEQ ID NO: 15310 - protein, 5 aa, Homo sapiens
SPGSQ

SEQ ID NO: 15311 - protein, 5 aa, Homo sapiens
ASFSF

SEQ ID NO: 15312 - protein, 5 aa, Homo sapiens
VPPLT

SEQ ID NO: 15313 - protein, 5 aa, Homo sapiens
PYWTN

SEQ ID NO: 15314 - protein, 5 aa, Homo sapiens
NDIPY

SEQ ID NO: 15315 - protein, 5 aa, Homo sapiens
LNHHS

SEQ ID NO: 15316 - protein, 5 aa, Homo sapiens
KDLFG

SEQ ID NO: 15317 - protein, 5 aa, Homo sapiens
HGSCL

SEQ ID NO: 15318 - protein, 5 aa, Homo sapiens
EAIPQ

SEQ ID NO: 15319 - protein, 5 aa, Homo sapiens
RIWSR

SEQ ID NO: 15320 - protein, 5 aa, Homo sapiens
LRPYK

SEQ ID NO: 15321 - protein, 5 aa, Homo sapiens
LHGAA

SEQ ID NO: 15322 - protein, 5 aa, Homo sapiens
SLMAV

SEQ ID NO: 15323 - protein, 5 aa, Homo sapiens
SIITY

SEQ ID NO: 15324 - protein, 5 aa, Homo sapiens
AERPG

SEQ ID NO: 15325 - protein, 5 aa, Homo sapiens
PRLAG

SEQ ID NO: 15326 - protein, 5 aa, Homo sapiens
TCASS

SEQ ID NO: 15327 - protein, 5 aa, Homo sapiens
VETMM

SEQ ID NO: 15328 - protein, 5 aa, Homo sapiens
YSRTM

SEQ ID NO: 15329 - protein, 5 aa, Homo sapiens
HSSQK

SEQ ID NO: 15330 - protein, 5 aa, Homo sapiens
TDGFN

SEQ ID NO: 15331 - protein, 5 aa, Homo sapiens
TLSRP

SEQ ID NO: 15332 - protein, 5 aa, Homo sapiens
LDHLP

SEQ ID NO: 15333 - protein, 5 aa, Homo sapiens
LICTP

SEQ ID NO: 15334 - protein, 5 aa, Homo sapiens
LRWVQ

SEQ ID NO: 15335 - protein, 5 aa, Homo sapiens
QMKGP

SEQ ID NO: 15336 - protein, 5 aa, Homo sapiens
LEESS

SEQ ID NO: 15337 - protein, 5 aa, Homo sapiens
KLVTA

SEQ ID NO: 15338 - protein, 5 aa, Homo sapiens
AGDSG

SEQ ID NO: 15339 - protein, 5 aa, Homo sapiens
WSPTM

SEQ ID NO: 15340 - protein, 5 aa, Homo sapiens
CSICC

SEQ ID NO: 15341 - protein, 5 aa, Homo sapiens
SRNQE

SEQ ID NO: 15342 - protein, 5 aa, Homo sapiens
NLLLL

SEQ ID NO: 15343 - protein, 5 aa, Homo sapiens
TYRPV

SEQ ID NO: 15344 - protein, 5 aa, Homo sapiens
LSLLF

SEQ ID NO: 15345 - protein, 5 aa, Homo sapiens
KREKK

SEQ ID NO: 15346 - protein, 5 aa, Homo sapiens
EDDPD

SEQ ID NO: 15347 - protein, 5 aa, Homo sapiens
GGQER

SEQ ID NO: 15348 - protein, 5 aa, Homo sapiens
LDILG

SEQ ID NO: 15349 - protein, 5 aa, Homo sapiens
DFGWD

SEQ ID NO: 15350 - protein, 5 aa, Homo sapiens
RQTAG

SEQ ID NO: 15351 - protein, 5 aa, Homo sapiens
QRSKV

SEQ ID NO: 15352 - protein, 5 aa, Homo sapiens
PSPGP

SEQ ID NO: 15353 - protein, 5 aa, Homo sapiens
ASRRL

SEQ ID NO: 15354 - protein, 5 aa, Homo sapiens
AENEF

SEQ ID NO: 15355 - protein, 5 aa, Homo sapiens
VTSSA

SEQ ID NO: 15356 - protein, 5 aa, Homo sapiens
WLLKY

SEQ ID NO: 15357 - protein, 5 aa, Homo sapiens
ASFSF

SEQ ID NO: 15358 - protein, 5 aa, Homo sapiens
PDSDP

SEQ ID NO: 15359 - protein, 5 aa, Homo sapiens
SSGLC

SEQ ID NO: 15360 - protein, 5 aa, Homo sapiens
EEREL

SEQ ID NO: 15361 - protein, 5 aa, Homo sapiens
IAANS

SEQ ID NO: 15362 - protein, 5 aa, Homo sapiens
TVRRG

SEQ ID NO: 15363 - protein, 5 aa, Homo sapiens
PNFSP

SEQ ID NO: 15364 - protein, 5 aa, Homo sapiens
ILAAN

SEQ ID NO: 15365 - protein, 5 aa, Homo sapiens
LELKA

SEQ ID NO: 15366 - protein, 5 aa, Homo sapiens
FRRDL

SEQ ID NO: 15367 - protein, 5 aa, Homo sapiens
SGGDS

SEQ ID NO: 15368 - protein, 5 aa, Homo sapiens
TLLTS

SEQ ID NO: 15369 - protein, 5 aa, Homo sapiens
GQSPA

SEQ ID NO: 15370 - protein, 5 aa, Homo sapiens
APAVP

SEQ ID NO: 15371 - protein, 5 aa, Homo sapiens
LHFTS

SEQ ID NO: 15372 - protein, 5 aa, Homo sapiens
IYKWE

SEQ ID NO: 15373 - protein, 5 aa, Homo sapiens
FADDP

SEQ ID NO: 15374 - protein, 5 aa, Homo sapiens
PNGML

SEQ ID NO: 15375 - protein, 5 aa, Homo sapiens
CCISL

SEQ ID NO: 15376 - protein, 5 aa, Homo sapiens
WAGEP

SEQ ID NO: 15377 - protein, 5 aa, Homo sapiens
MMNTV

SEQ ID NO: 15378 - protein, 5 aa, Homo sapiens
YTSAK

SEQ ID NO: 15379 - protein, 5 aa, Homo sapiens
KDNRQ

SEQ ID NO: 15380 - protein, 5 aa, Homo sapiens
CFFLR

SEQ ID NO: 15381 - protein, 5 aa, Homo sapiens
VPVLS

SEQ ID NO: 15382 - protein, 5 aa, Homo sapiens
HKTPY

SEQ ID NO: 15383 - protein, 5 aa, Homo sapiens
LPVKP

SEQ ID NO: 15384 - protein, 5 aa, Homo sapiens
RPRHT

SEQ ID NO: 15385 - protein, 5 aa, Homo sapiens
SDDEF

SEQ ID NO: 15386 - protein, 5 aa, Homo sapiens
TGEKP

SEQ ID NO: 15387 - protein, 5 aa, Homo sapiens
AISCW

SEQ ID NO: 15388 - protein, 5 aa, Homo sapiens
KFLRK

SEQ ID NO: 15389 - protein, 5 aa, Homo sapiens
QRTHT

SEQ ID NO: 15390 - protein, 5 aa, Homo sapiens
QTQAC

SEQ ID NO: 15391 - protein, 5 aa, Homo sapiens
RQAQD

SEQ ID NO: 15392 - protein, 5 aa, Homo sapiens
AIAAS

SEQ ID NO: 15393 - protein, 5 aa, Homo sapiens
QPQLM

SEQ ID NO: 15394 - protein, 5 aa, Homo sapiens
GKLCS

SEQ ID NO: 15395 - protein, 5 aa, Homo sapiens
RSGIF

SEQ ID NO: 15396 - protein, 5 aa, Homo sapiens
KETYY

SEQ ID NO: 15397 - protein, 5 aa, Homo sapiens
SQSLS

SEQ ID NO: 15398 - protein, 5 aa, Homo sapiens
TQFMN

SEQ ID NO: 15399 - protein, 5 aa, Homo sapiens
VYMKS

SEQ ID NO: 15400 - protein, 5 aa, Homo sapiens
NQLLL

SEQ ID NO: 15401 - protein, 5 aa, Homo sapiens
GLPQH

SEQ ID NO: 15402 - protein, 5 aa, Homo sapiens
KGALL

SEQ ID NO: 15403 - protein, 5 aa, Homo sapiens
RIIQI

SEQ ID NO: 15404 - protein, 5 aa, Homo sapiens
EDYEF

SEQ ID NO: 15405 - protein, 5 aa, Homo sapiens
KVYWY

SEQ ID NO: 15406 - protein, 5 aa, Homo sapiens
SHNEL

SEQ ID NO: 15407 - protein, 5 aa, Homo sapiens
IVHYG

SEQ ID NO: 15408 - protein, 5 aa, Homo sapiens
STTRV

SEQ ID NO: 15409 - protein, 5 aa, Homo sapiens
NVSSA

SEQ ID NO: 15410 - protein, 5 aa, Homo sapiens
CVGAG

SEQ ID NO: 15411 - protein, 5 aa, Homo sapiens
PRPVL

SEQ ID NO: 15412 - protein, 5 aa, Homo sapiens
YQSIN

SEQ ID NO: 15413 - protein, 5 aa, Homo sapiens
NKMLK

SEQ ID NO: 15414 - protein, 5 aa, Homo sapiens
WCPFW

SEQ ID NO: 15415 - protein, 5 aa, Homo sapiens
YGYGS

SEQ ID NO: 15416 - protein, 5 aa, Homo sapiens
NQRRI

SEQ ID NO: 15417 - protein, 5 aa, Homo sapiens
ENNFD

SEQ ID NO: 15418 - protein, 5 aa, Homo sapiens
SITSI

SEQ ID NO: 15419 - protein, 5 aa, Homo sapiens
ILGLE

SEQ ID NO: 15420 - protein, 5 aa, Homo sapiens
TSVQV

SEQ ID NO: 15421 - protein, 5 aa, Homo sapiens
ESLVV

SEQ ID NO: 15422 - protein, 5 aa, Homo sapiens
QFNTH

SEQ ID NO: 15423 - protein, 5 aa, Homo sapiens
SQPIT

SEQ ID NO: 15424 - protein, 5 aa, Homo sapiens
YESHV

SEQ ID NO: 15425 - protein, 5 aa, Homo sapiens
LNMMT

SEQ ID NO: 15426 - protein, 5 aa, Homo sapiens
SSLLS

SEQ ID NO: 15427 - protein, 5 aa, Homo sapiens
APPEC

SEQ ID NO: 15428 - protein, 5 aa, Homo sapiens
EIFFS

SEQ ID NO: 15429 - protein, 5 aa, Homo sapiens
KQSQC

SEQ ID NO: 15430 - protein, 5 aa, Homo sapiens
SLSHV

SEQ ID NO: 15431 - protein, 5 aa, Homo sapiens
EPWLS

SEQ ID NO: 15432 - protein, 5 aa, Homo sapiens
PSTEL

SEQ ID NO: 15433 - protein, 5 aa, Homo sapiens
PNPQL

SEQ ID NO: 15434 - protein, 5 aa, Homo sapiens
SQASQ

SEQ ID NO: 15435 - protein, 5 aa, Homo sapiens
WDSIV

SEQ ID NO: 15436 - protein, 5 aa, Homo sapiens
IKDAF

SEQ ID NO: 15437 - protein, 5 aa, Homo sapiens
FNVML

SEQ ID NO: 15438 - protein, 5 aa, Homo sapiens
LHDNT

SEQ ID NO: 15439 - protein, 5 aa, Homo sapiens
KIIFF

SEQ ID NO: 15440 - protein, 5 aa, Homo sapiens
EKLHS

SEQ ID NO: 15441 - protein, 5 aa, Homo sapiens
PSLPD

SEQ ID NO: 15442 - protein, 5 aa, Homo sapiens
GGFTS

SEQ ID NO: 15443 - protein, 5 aa, Homo sapiens
SFLMS

SEQ ID NO: 15444 - protein, 5 aa, Homo sapiens
DNEKI

SEQ ID NO: 15445 - protein, 5 aa, Homo sapiens
VSFSE

SEQ ID NO: 15446 - protein, 5 aa, Homo sapiens
SEAEK

SEQ ID NO: 15447 - protein, 5 aa, Homo sapiens
IARGN

SEQ ID NO: 15448 - protein, 5 aa, Homo sapiens
DCILL

SEQ ID NO: 15449 - protein, 5 aa, Homo sapiens
LLKQT

SEQ ID NO: 15450 - protein, 5 aa, Homo sapiens
IIETM

SEQ ID NO: 15451 - protein, 5 aa, Homo sapiens
GYLMG

SEQ ID NO: 15452 - protein, 5 aa, Homo sapiens
KREDL

SEQ ID NO: 15453 - protein, 5 aa, Homo sapiens
ERLSA

SEQ ID NO: 15454 - protein, 5 aa, Homo sapiens
FDFEL

SEQ ID NO: 15455 - protein, 5 aa, Homo sapiens
SAQHH

SEQ ID NO: 15456 - protein, 5 aa, Homo sapiens
IPPQT

SEQ ID NO: 15457 - protein, 5 aa, Homo sapiens
QMLKI

SEQ ID NO: 15458 - protein, 5 aa, Homo sapiens
ERPKK

SEQ ID NO: 15459 - protein, 5 aa, Homo sapiens
AKTLK

SEQ ID NO: 15460 - protein, 5 aa, Homo sapiens
LGPDG

SEQ ID NO: 15461 - protein, 5 aa, Homo sapiens
LLGKG

SEQ ID NO: 15462 - protein, 5 aa, Homo sapiens
ETPAP

SEQ ID NO: 15463 - protein, 5 aa, Homo sapiens
NETTV

SEQ ID NO: 15464 - protein, 5 aa, Homo sapiens
LTANH

SEQ ID NO: 15465 - protein, 5 aa, Homo sapiens
WIHFI

SEQ ID NO: 15466 - protein, 5 aa, Homo sapiens
EEIFC

SEQ ID NO: 15467 - protein, 5 aa, Homo sapiens
KERGK

SEQ ID NO: 15468 - protein, 5 aa, Homo sapiens
DTTHG

SEQ ID NO: 15469 - protein, 5 aa, Homo sapiens
TDAHL

SEQ ID NO: 15470 - protein, 5 aa, Homo sapiens
DIDDI

SEQ ID NO: 15471 - protein, 5 aa, Homo sapiens
FGVYI

SEQ ID NO: 15472 - protein, 5 aa, Homo sapiens
NLLQC

SEQ ID NO: 15473 - protein, 5 aa, Homo sapiens
SNGSN

SEQ ID NO: 15474 - protein, 5 aa, Homo sapiens
EEQQI

SEQ ID NO: 15475 - protein, 5 aa, Homo sapiens
AQAPL

SEQ ID NO: 15476 - protein, 5 aa, Homo sapiens
ELKIL

SEQ ID NO: 15477 - protein, 5 aa, Homo sapiens
ECPAS

SEQ ID NO: 15478 - protein, 5 aa, Homo sapiens
QTIGI

SEQ ID NO: 15479 - protein, 5 aa, Homo sapiens
PHREA

SEQ ID NO: 15480 - protein, 5 aa, Homo sapiens
PGNLV

SEQ ID NO: 15481 - protein, 5 aa, Homo sapiens
AQEIG

SEQ ID NO: 15482 - protein, 5 aa, Homo sapiens
RASGS

SEQ ID NO: 15483 - protein, 5 aa, Homo sapiens
QRKQK

SEQ ID NO: 15484 - protein, 5 aa, Homo sapiens
DDCCC

SEQ ID NO: 15485 - protein, 5 aa, Homo sapiens
SELDN

SEQ ID NO: 15486 - protein, 5 aa, Homo sapiens
QIPQS

SEQ ID NO: 15487 - protein, 5 aa, Homo sapiens
EQQIF

SEQ ID NO: 15488 - protein, 5 aa, Homo sapiens
IAEAP

SEQ ID NO: 15489 - protein, 5 aa, Homo sapiens
ENSKI

SEQ ID NO: 15490 - protein, 5 aa, Homo sapiens
KEWLI

SEQ ID NO: 15491 - protein, 5 aa, Homo sapiens
RRKML

SEQ ID NO: 15492 - protein, 5 aa, Homo sapiens
PHHRS

SEQ ID NO: 15493 - protein, 5 aa, Homo sapiens
WMSRQ

SEQ ID NO: 15494 - protein, 5 aa, Homo sapiens
HWTYK

SEQ ID NO: 15495 - protein, 5 aa, Homo sapiens
KLIYH

SEQ ID NO: 15496 - protein, 5 aa, Homo sapiens
SLTEQ

SEQ ID NO: 15497 - protein, 5 aa, Homo sapiens
DSRCN

SEQ ID NO: 15498 - protein, 5 aa, Homo sapiens
LLLIT

SEQ ID NO: 15499 - protein, 5 aa, Homo sapiens
ESQKK

SEQ ID NO: 15500 - protein, 5 aa, Homo sapiens
VKSCL

SEQ ID NO: 15501 - protein, 5 aa, Homo sapiens
SPTKV

SEQ ID NO: 15502 - protein, 5 aa, Homo sapiens
VIEGS

SEQ ID NO: 15503 - protein, 5 aa, Homo sapiens
KPWET

SEQ ID NO: 15504 - protein, 5 aa, Homo sapiens
LQGLQ

SEQ ID NO: 15505 - protein, 5 aa, Homo sapiens
ALYLT

SEQ ID NO: 15506 - protein, 5 aa, Homo sapiens
IRQRI

SEQ ID NO: 15507 - protein, 5 aa, Homo sapiens
KMALT

SEQ ID NO: 15508 - protein, 5 aa, Homo sapiens
HNKDF

SEQ ID NO: 15509 - protein, 5 aa, Homo sapiens
LGRSL

SEQ ID NO: 15510 - protein, 5 aa, Homo sapiens
EDQLG

SEQ ID NO: 15511 - protein, 5 aa, Homo sapiens
KDRRK

SEQ ID NO: 15512 - protein, 5 aa, Homo sapiens
FKHNF

SEQ ID NO: 15513 - protein, 5 aa, Homo sapiens
ISALK

SEQ ID NO: 15514 - protein, 5 aa, Homo sapiens
VTNLG

SEQ ID NO: 15515 - protein, 5 aa, Homo sapiens
GSFRR

SEQ ID NO: 15516 - protein, 5 aa, Homo sapiens
PVFTL

SEQ ID NO: 15517 - protein, 5 aa, Homo sapiens
STATV

SEQ ID NO: 15518 - protein, 5 aa, Homo sapiens
GNMFL

SEQ ID NO: 15519 - protein, 5 aa, Homo sapiens
AGGAP

SEQ ID NO: 15520 - protein, 5 aa, Homo sapiens
VLLST

SEQ ID NO: 15521 - protein, 5 aa, Homo sapiens
KRRRF

SEQ ID NO: 15522 - protein, 5 aa, Homo sapiens
FTSAL

SEQ ID NO: 15523 - protein, 5 aa, Homo sapiens
ISTDV

SEQ ID NO: 15524 - protein, 5 aa, Homo sapiens
AHTNK

SEQ ID NO: 15525 - protein, 5 aa, Homo sapiens
ADDDP

SEQ ID NO: 15526 - protein, 5 aa, Homo sapiens
RCSAC

SEQ ID NO: 15527 - protein, 5 aa, Homo sapiens
QKKTT

SEQ ID NO: 15528 - protein, 5 aa, Homo sapiens
RGMGG

SEQ ID NO: 15529 - protein, 5 aa, Homo sapiens
DENES

SEQ ID NO: 15530 - protein, 5 aa, Homo sapiens
VHNFR

SEQ ID NO: 15531 - protein, 5 aa, Homo sapiens
LKYFQ

SEQ ID NO: 15532 - protein, 5 aa, Homo sapiens
AKEAF

SEQ ID NO: 15533 - protein, 5 aa, Homo sapiens
ILNEL

SEQ ID NO: 15534 - protein, 5 aa, Homo sapiens
VTTYL

SEQ ID NO: 15535 - protein, 5 aa, Homo sapiens
TVKIV

SEQ ID NO: 15536 - protein, 5 aa, Homo sapiens
REDTM

SEQ ID NO: 15537 - protein, 5 aa, Homo sapiens
AQLMY

SEQ ID NO: 15538 - protein, 5 aa, Homo sapiens
EHDEN

SEQ ID NO: 15539 - protein, 5 aa, Homo sapiens
EQAKK

SEQ ID NO: 15540 - protein, 5 aa, Homo sapiens
LNSLK

SEQ ID NO: 15541 - protein, 5 aa, Homo sapiens
EMQNA

SEQ ID NO: 15542 - protein, 5 aa, Homo sapiens
ERGML

SEQ ID NO: 15543 - protein, 5 aa, Homo sapiens
FTQPS

SEQ ID NO: 15544 - protein, 5 aa, Homo sapiens
TGFSS

SEQ ID NO: 15545 - protein, 5 aa, Homo sapiens
DDMQL

SEQ ID NO: 15546 - protein, 5 aa, Homo sapiens
SSVHN

SEQ ID NO: 15547 - protein, 5 aa, Homo sapiens
EQELL

SEQ ID NO: 15548 - protein, 5 aa, Homo sapiens
LLFRP

SEQ ID NO: 15549 - protein, 5 aa, Homo sapiens
VVKLV

SEQ ID NO: 15550 - protein, 5 aa, Homo sapiens
IYWWG

SEQ ID NO: 15551 - protein, 5 aa, Homo sapiens
SGGWC

SEQ ID NO: 15552 - protein, 5 aa, Homo sapiens
QTSVQ

SEQ ID NO: 15553 - protein, 5 aa, Homo sapiens
DHADL

SEQ ID NO: 15554 - protein, 5 aa, Homo sapiens
METQE

SEQ ID NO: 15555 - protein, 5 aa, Homo sapiens
SDDSD

SEQ ID NO: 15556 - protein, 5 aa, Homo sapiens
FPPPL

SEQ ID NO: 15557 - protein, 5 aa, Homo sapiens
LGSFL

SEQ ID NO: 15558 - protein, 5 aa, Homo sapiens
DEPAV

SEQ ID NO: 15559 - protein, 5 aa, Homo sapiens
TKNNP

SEQ ID NO: 15560 - protein, 5 aa, Homo sapiens
NAPPP

SEQ ID NO: 15561 - protein, 5 aa, Homo sapiens
QLPKI

SEQ ID NO: 15562 - protein, 5 aa, Homo sapiens
ESTAE

SEQ ID NO: 15563 - protein, 5 aa, Homo sapiens
EDGTE

SEQ ID NO: 15564 - protein, 5 aa, Homo sapiens
MLMIL

SEQ ID NO: 15565 - protein, 5 aa, Homo sapiens
LLENF

SEQ ID NO: 15566 - protein, 5 aa, Homo sapiens
ANYGS

SEQ ID NO: 15567 - protein, 5 aa, Homo sapiens
SMAQP

SEQ ID NO: 15568 - protein, 5 aa, Homo sapiens
VPLML

SEQ ID NO: 15569 - protein, 5 aa, Homo sapiens
SYPGA

SEQ ID NO: 15570 - protein, 5 aa, Homo sapiens
GATCH

SEQ ID NO: 15571 - protein, 5 aa, Homo sapiens
RSRQH

SEQ ID NO: 15572 - protein, 5 aa, Homo sapiens
DVRQS

SEQ ID NO: 15573 - protein, 5 aa, Homo sapiens
AERAH

SEQ ID NO: 15574 - protein, 5 aa, Homo sapiens
ANRPY

SEQ ID NO: 15575 - protein, 5 aa, Homo sapiens
KPVDL

SEQ ID NO: 15576 - protein, 5 aa, Homo sapiens
VALLL

SEQ ID NO: 15577 - protein, 5 aa, Homo sapiens
AATGN

SEQ ID NO: 15578 - protein, 5 aa, Homo sapiens
KYRLV

SEQ ID NO: 15579 - protein, 5 aa, Homo sapiens
AQYAN

SEQ ID NO: 15580 - protein, 5 aa, Homo sapiens
VGRLV

SEQ ID NO: 15581 - protein, 5 aa, Homo sapiens
AGLWS

SEQ ID NO: 15582 - protein, 5 aa, Homo sapiens
QEPNP

SEQ ID NO: 15583 - protein, 5 aa, Homo sapiens
LAAAP

SEQ ID NO: 15584 - protein, 5 aa, Homo sapiens
ASKVL

SEQ ID NO: 15585 - protein, 5 aa, Homo sapiens
DEIAV

SEQ ID NO: 15586 - protein, 5 aa, Homo sapiens
KPLYL

SEQ ID NO: 15587 - protein, 5 aa, Homo sapiens
SSVTS

SEQ ID NO: 15588 - protein, 5 aa, Homo sapiens
GDQEN

SEQ ID NO: 15589 - protein, 5 aa, Homo sapiens
ARGPG

SEQ ID NO: 15590 - protein, 5 aa, Homo sapiens
RTCES

SEQ ID NO: 15591 - protein, 5 aa, Homo sapiens
SFREK

SEQ ID NO: 15592 - protein, 5 aa, Homo sapiens
SLSPK

SEQ ID NO: 15593 - protein, 5 aa, Homo sapiens
PPTNS

SEQ ID NO: 15594 - protein, 5 aa, Homo sapiens
PKEHI

SEQ ID NO: 15595 - protein, 5 aa, Homo sapiens
DDTAL

SEQ ID NO: 15596 - protein, 5 aa, Homo sapiens
QVHKV

SEQ ID NO: 15597 - protein, 5 aa, Homo sapiens
GSSQN

SEQ ID NO: 15598 - protein, 5 aa, Homo sapiens
IKNIQ

SEQ ID NO: 15599 - protein, 5 aa, Homo sapiens
KVALG

SEQ ID NO: 15600 - protein, 5 aa, Homo sapiens
LEAGY

SEQ ID NO: 15601 - protein, 5 aa, Homo sapiens
IPPRL

SEQ ID NO: 15602 - protein, 5 aa, Homo sapiens
EHIEL

SEQ ID NO: 15603 - protein, 5 aa, Homo sapiens
SSSHA

SEQ ID NO: 15604 - protein, 5 aa, Homo sapiens
APCLL

SEQ ID NO: 15605 - protein, 5 aa, Homo sapiens
KVSHV

SEQ ID NO: 15606 - protein, 5 aa, Homo sapiens
PSGGR

SEQ ID NO: 15607 - protein, 5 aa, Homo sapiens
LDWAE

SEQ ID NO: 15608 - protein, 5 aa, Homo sapiens
KTGCD

SEQ ID NO: 15609 - protein, 5 aa, Homo sapiens
IAANS

SEQ ID NO: 15610 - protein, 5 aa, Homo sapiens
AGDAK

SEQ ID NO: 15611 - protein, 5 aa, Homo sapiens
SLAAK

SEQ ID NO: 15612 - protein, 5 aa, Homo sapiens
QFYNK

SEQ ID NO: 15613 - protein, 5 aa, Homo sapiens
LVNDT

SEQ ID NO: 15614 - protein, 5 aa, Homo sapiens
PACDT

SEQ ID NO: 15615 - protein, 5 aa, Homo sapiens
CPSQQ

SEQ ID NO: 15616 - protein, 5 aa, Homo sapiens
TASAL

SEQ ID NO: 15617 - protein, 5 aa, Homo sapiens
DLLIN

SEQ ID NO: 15618 - protein, 5 aa, Homo sapiens
LEAAT

SEQ ID NO: 15619 - protein, 5 aa, Homo sapiens
QCIPS

SEQ ID NO: 15620 - protein, 5 aa, Homo sapiens
QKKSV

SEQ ID NO: 15621 - protein, 5 aa, Homo sapiens
WKEIG

SEQ ID NO: 15622 - protein, 5 aa, Homo sapiens
SDEDL

SEQ ID NO: 15623 - protein, 5 aa, Homo sapiens
LPPQS

SEQ ID NO: 15624 - protein, 5 aa, Homo sapiens
RGLLT

SEQ ID NO: 15625 - protein, 5 aa, Homo sapiens
VIPHS

SEQ ID NO: 15626 - protein, 5 aa, Homo sapiens
ANKQS

SEQ ID NO: 15627 - protein, 5 aa, Homo sapiens
YCGNV

SEQ ID NO: 15628 - protein, 5 aa, Homo sapiens
EAKSD

SEQ ID NO: 15629 - protein, 5 aa, Homo sapiens
HTINL

SEQ ID NO: 15630 - protein, 5 aa, Homo sapiens
ISLRR

SEQ ID NO: 15631 - protein, 5 aa, Homo sapiens
RKGGR

SEQ ID NO: 15632 - protein, 5 aa, Homo sapiens
KSPEV

SEQ ID NO: 15633 - protein, 5 aa, Homo sapiens
DDAEM

SEQ ID NO: 15634 - protein, 5 aa, Homo sapiens
VEKDD

SEQ ID NO: 15635 - protein, 5 aa, Homo sapiens
TKLGL

SEQ ID NO: 15636 - protein, 5 aa, Homo sapiens
TTSSL

SEQ ID NO: 15637 - protein, 5 aa, Homo sapiens
DHPAI

SEQ ID NO: 15638 - protein, 5 aa, Homo sapiens
PADGP

SEQ ID NO: 15639 - protein, 5 aa, Homo sapiens
LHQEK

SEQ ID NO: 15640 - protein, 5 aa, Homo sapiens
SGSTP

SEQ ID NO: 15641 - protein, 5 aa, Homo sapiens
DTSLL

SEQ ID NO: 15642 - protein, 5 aa, Homo sapiens
RTQVS

SEQ ID NO: 15643 - protein, 5 aa, Homo sapiens
DCGQF

SEQ ID NO: 15644 - protein, 5 aa, Homo sapiens
SWGAN

SEQ ID NO: 15645 - protein, 5 aa, Homo sapiens
FSCPE

SEQ ID NO: 15646 - protein, 5 aa, Homo sapiens
KCHCN

SEQ ID NO: 15647 - protein, 5 aa, Homo sapiens
YQCKI

SEQ ID NO: 15648 - protein, 5 aa, Homo sapiens
ASQQL

SEQ ID NO: 15649 - protein, 5 aa, Homo sapiens
PLTHL

SEQ ID NO: 15650 - protein, 5 aa, Homo sapiens
MMNDE

SEQ ID NO: 15651 - protein, 5 aa, Homo sapiens
PNYFR

SEQ ID NO: 15652 - protein, 5 aa, Homo sapiens
KVTDL

SEQ ID NO: 15653 - protein, 5 aa, Homo sapiens
AVALE

SEQ ID NO: 15654 - protein, 5 aa, Homo sapiens
ALLKA

SEQ ID NO: 15655 - protein, 5 aa, Homo sapiens
LEQHS

SEQ ID NO: 15656 - protein, 5 aa, Homo sapiens
YSNEM

SEQ ID NO: 15657 - protein, 5 aa, Homo sapiens
RVQLQ

SEQ ID NO: 15658 - protein, 5 aa, Homo sapiens
GSEGT

SEQ ID NO: 15659 - protein, 5 aa, Homo sapiens
AMDSF

SEQ ID NO: 15660 - protein, 5 aa, Homo sapiens
KQSQC

SEQ ID NO: 15661 - protein, 5 aa, Homo sapiens
RSVSL

SEQ ID NO: 15662 - protein, 5 aa, Homo sapiens
VRFVL

SEQ ID NO: 15663 - protein, 5 aa, Homo sapiens
SGGVF

SEQ ID NO: 15664 - protein, 5 aa, Homo sapiens
QKAME

SEQ ID NO: 15665 - protein, 5 aa, Homo sapiens
GKCGE

SEQ ID NO: 15666 - protein, 5 aa, Homo sapiens
FSVKM

SEQ ID NO: 15667 - protein, 5 aa, Homo sapiens
FRSLY

SEQ ID NO: 15668 - protein, 5 aa, Homo sapiens
RDDHL

SEQ ID NO: 15669 - protein, 5 aa, Homo sapiens
KLTKK

SEQ ID NO: 15670 - protein, 5 aa, Homo sapiens
VMKRD

SEQ ID NO: 15671 - protein, 5 aa, Homo sapiens
EAYFI

SEQ ID NO: 15672 - protein, 5 aa, Homo sapiens
RQCGP

SEQ ID NO: 15673 - protein, 5 aa, Homo sapiens
VVFPH

SEQ ID NO: 15674 - protein, 5 aa, Homo sapiens
TRGTL

SEQ ID NO: 15675 - protein, 5 aa, Homo sapiens
ALNSY

SEQ ID NO: 15676 - protein, 5 aa, Homo sapiens
KCKKM

SEQ ID NO: 15677 - protein, 5 aa, Homo sapiens
RAYMW

SEQ ID NO: 15678 - protein, 5 aa, Homo sapiens
SSSEV

SEQ ID NO: 15679 - protein, 5 aa, Homo sapiens
WIYLS

SEQ ID NO: 15680 - protein, 5 aa, Homo sapiens
TLEDR

SEQ ID NO: 15681 - protein, 5 aa, Homo sapiens
TSRRR

SEQ ID NO: 15682 - protein, 5 aa, Homo sapiens
LRRPG

SEQ ID NO: 15683 - protein, 5 aa, Homo sapiens
HQGYY

SEQ ID NO: 15684 - protein, 5 aa, Homo sapiens
QKYTV

SEQ ID NO: 15685 - protein, 5 aa, Homo sapiens
GSSSN

SEQ ID NO: 15686 - protein, 5 aa, Homo sapiens
KRKKN

SEQ ID NO: 15687 - protein, 5 aa, Homo sapiens
MIQLF

SEQ ID NO: 15688 - protein, 5 aa, Homo sapiens
PQSDC

SEQ ID NO: 15689 - protein, 5 aa, Homo sapiens
DPRNV

SEQ ID NO: 15690 - protein, 5 aa, Homo sapiens
PAIPK

SEQ ID NO: 15691 - protein, 5 aa, Homo sapiens
KHLQN

SEQ ID NO: 15692 - protein, 5 aa, Homo sapiens
QVRPL

SEQ ID NO: 15693 - protein, 5 aa, Homo sapiens
NLISR

SEQ ID NO: 15694 - protein, 5 aa, Homo sapiens
MLGPK

SEQ ID NO: 15695 - protein, 5 aa, Homo sapiens
LAQSY

SEQ ID NO: 15696 - protein, 5 aa, Homo sapiens
DQEET

SEQ ID NO: 15697 - protein, 5 aa, Homo sapiens
DQMCQ

SEQ ID NO: 15698 - protein, 5 aa, Homo sapiens
EDQLN

SEQ ID NO: 15699 - protein, 5 aa, Homo sapiens
GYDTD

SEQ ID NO: 15700 - protein, 5 aa, Homo sapiens
MPRKQ

SEQ ID NO: 15701 - protein, 5 aa, Homo sapiens
GESDL

SEQ ID NO: 15702 - protein, 5 aa, Homo sapiens
LQSYF

SEQ ID NO: 15703 - protein, 5 aa, Homo sapiens
KPSLG

SEQ ID NO: 15704 - protein, 5 aa, Homo sapiens
AENPP

SEQ ID NO: 15705 - protein, 5 aa, Homo sapiens
FCTIL

SEQ ID NO: 15706 - protein, 5 aa, Homo sapiens
RCQAR

SEQ ID NO: 15707 - protein, 5 aa, Homo sapiens
LLVRW

SEQ ID NO: 15708 - protein, 5 aa, Homo sapiens
EDDVE

SEQ ID NO: 15709 - protein, 5 aa, Homo sapiens
KERDS

SEQ ID NO: 15710 - protein, 5 aa, Homo sapiens
TTAKS

SEQ ID NO: 15711 - protein, 5 aa, Homo sapiens
PSFAR

SEQ ID NO: 15712 - protein, 5 aa, Homo sapiens
GPANH

SEQ ID NO: 15713 - protein, 5 aa, Homo sapiens
KEFLS

SEQ ID NO: 15714 - protein, 5 aa, Homo sapiens
LRWIP

SEQ ID NO: 15715 - protein, 5 aa, Homo sapiens
PKHKA

SEQ ID NO: 15716 - protein, 5 aa, Homo sapiens
ISSCR

SEQ ID NO: 15717 - protein, 5 aa, Homo sapiens
HEAQA

SEQ ID NO: 15718 - protein, 5 aa, Homo sapiens
EEGIS

SEQ ID NO: 15719 - protein, 5 aa, Homo sapiens
GKDVF

SEQ ID NO: 15720 - protein, 5 aa, Homo sapiens
ATAKL

SEQ ID NO: 15721 - protein, 5 aa, Homo sapiens
SRVAK

SEQ ID NO: 15722 - protein, 5 aa, Homo sapiens
VTSLF

SEQ ID NO: 15723 - protein, 5 aa, Homo sapiens
ILESI

SEQ ID NO: 15724 - protein, 5 aa, Homo sapiens
CLKKL

SEQ ID NO: 15725 - protein, 5 aa, Homo sapiens
FLDNW

SEQ ID NO: 15726 - protein, 5 aa, Homo sapiens
PLSTA

SEQ ID NO: 15727 - protein, 5 aa, Homo sapiens
TAEQP

SEQ ID NO: 15728 - protein, 5 aa, Homo sapiens
LHVCL

SEQ ID NO: 15729 - protein, 5 aa, Homo sapiens
LNLQQ

SEQ ID NO: 15730 - protein, 5 aa, Homo sapiens
SFISA

SEQ ID NO: 15731 - protein, 5 aa, Homo sapiens
HRKCF

SEQ ID NO: 15732 - protein, 5 aa, Homo sapiens
QAAHF

SEQ ID NO: 15733 - protein, 5 aa, Homo sapiens
QECGC

SEQ ID NO: 15734 - protein, 5 aa, Homo sapiens
YCCFV

SEQ ID NO: 15735 - protein, 5 aa, Homo sapiens
PEPFL

SEQ ID NO: 15736 - protein, 5 aa, Homo sapiens
KAKGK

SEQ ID NO: 15737 - protein, 5 aa, Homo sapiens
RGERA

SEQ ID NO: 15738 - protein, 5 aa, Homo sapiens
LAQVR

SEQ ID NO: 15739 - protein, 5 aa, Homo sapiens
PTVSK

SEQ ID NO: 15740 - protein, 5 aa, Homo sapiens
IPHDA

SEQ ID NO: 15741 - protein, 5 aa, Homo sapiens
TTVWI

SEQ ID NO: 15742 - protein, 5 aa, Homo sapiens
WNILG

SEQ ID NO: 15743 - protein, 5 aa, Homo sapiens
TRTKK

SEQ ID NO: 15744 - protein, 5 aa, Homo sapiens
QWRRY

SEQ ID NO: 15745 - protein, 5 aa, Homo sapiens
AGKVP

SEQ ID NO: 15746 - protein, 5 aa, Homo sapiens
IATEV

SEQ ID NO: 15747 - protein, 5 aa, Homo sapiens
GWSVL

SEQ ID NO: 15748 - protein, 5 aa, Homo sapiens
AAAAP

SEQ ID NO: 15749 - protein, 5 aa, Homo sapiens
MKRLT

SEQ ID NO: 15750 - protein, 5 aa, Homo sapiens
GSWDP

SEQ ID NO: 15751 - protein, 5 aa, Homo sapiens
LVGKK

SEQ ID NO: 15752 - protein, 5 aa, Homo sapiens
SKVLL

SEQ ID NO: 15753 - protein, 5 aa, Homo sapiens
ALYYE

SEQ ID NO: 15754 - protein, 5 aa, Homo sapiens
RQAQQ

SEQ ID NO: 15755 - protein, 5 aa, Homo sapiens
HQLYI

SEQ ID NO: 15756 - protein, 5 aa, Homo sapiens
ECRDI

SEQ ID NO: 15757 - protein, 5 aa, Homo sapiens
IPQQL

SEQ ID NO: 15758 - protein, 5 aa, Homo sapiens
KTSLW

SEQ ID NO: 15759 - protein, 5 aa, Homo sapiens
VMTMV

SEQ ID NO: 15760 - protein, 5 aa, Homo sapiens
SSHEA

SEQ ID NO: 15761 - protein, 5 aa, Homo sapiens
TLQGE

SEQ ID NO: 15762 - protein, 5 aa, Homo sapiens
NTNRD

SEQ ID NO: 15763 - protein, 5 aa, Homo sapiens
AFGNF

SEQ ID NO: 15764 - protein, 5 aa, Homo sapiens
VYYTR

SEQ ID NO: 15765 - protein, 5 aa, Homo sapiens
RGERA

SEQ ID NO: 15766 - protein, 5 aa, Homo sapiens
RRLQP

SEQ ID NO: 15767 - protein, 5 aa, Homo sapiens
SFCYR

SEQ ID NO: 15768 - protein, 5 aa, Homo sapiens
EEWVL

SEQ ID NO: 15769 - protein, 5 aa, Homo sapiens
LKMLS

SEQ ID NO: 15770 - protein, 5 aa, Homo sapiens
RDSYS

SEQ ID NO: 15771 - protein, 5 aa, Homo sapiens
APQEA

SEQ ID NO: 15772 - protein, 5 aa, Homo sapiens
RRFIT

SEQ ID NO: 15773 - protein, 5 aa, Homo sapiens
LEDVA

SEQ ID NO: 15774 - protein, 5 aa, Homo sapiens
AESDS

SEQ ID NO: 15775 - protein, 5 aa, Homo sapiens
ALIND

SEQ ID NO: 15776 - protein, 5 aa, Homo sapiens
LRNRK

SEQ ID NO: 15777 - protein, 5 aa, Homo sapiens
TSTRL

SEQ ID NO: 15778 - protein, 5 aa, Homo sapiens
CCVLV

SEQ ID NO: 15779 - protein, 5 aa, Homo sapiens
QNRGY

SEQ ID NO: 15780 - protein, 5 aa, Homo sapiens
MEEDP

SEQ ID NO: 15781 - protein, 5 aa, Homo sapiens
HWFDV

SEQ ID NO: 15782 - protein, 5 aa, Homo sapiens
VETVV

SEQ ID NO: 15783 - protein, 5 aa, Homo sapiens
RKETA

SEQ ID NO: 15784 - protein, 5 aa, Homo sapiens
ALGCL

SEQ ID NO: 15785 - protein, 5 aa, Homo sapiens
STYYL

SEQ ID NO: 15786 - protein, 5 aa, Homo sapiens
YLLGQ

SEQ ID NO: 15787 - protein, 5 aa, Homo sapiens
VYRMV

SEQ ID NO: 15788 - protein, 5 aa, Homo sapiens
NELKL

SEQ ID NO: 15789 - protein, 5 aa, Homo sapiens
FGRSY

SEQ ID NO: 15790 - protein, 5 aa, Homo sapiens
NRTHF

SEQ ID NO: 15791 - protein, 5 aa, Homo sapiens
MEKQK

SEQ ID NO: 15792 - protein, 5 aa, Homo sapiens
SCKCS

SEQ ID NO: 15793 - protein, 5 aa, Homo sapiens
SDSDT

SEQ ID NO: 15794 - protein, 5 aa, Homo sapiens
AGQIV

SEQ ID NO: 15795 - protein, 5 aa, Homo sapiens
AGKSA

SEQ ID NO: 15796 - protein, 5 aa, Homo sapiens
REEKC

SEQ ID NO: 15797 - protein, 5 aa, Homo sapiens
DRFYF

SEQ ID NO: 15798 - protein, 5 aa, Homo sapiens
TDTHL

SEQ ID NO: 15799 - protein, 5 aa, Homo sapiens
IENIK

SEQ ID NO: 15800 - protein, 5 aa, Homo sapiens
DIPLN

SEQ ID NO: 15801 - protein, 5 aa, Homo sapiens
NCKVQ

SEQ ID NO: 15802 - protein, 5 aa, Homo sapiens
NSRLI

SEQ ID NO: 15803 - protein, 5 aa, Homo sapiens
EIESH

SEQ ID NO: 15804 - protein, 5 aa, Homo sapiens
FNNSF

SEQ ID NO: 15805 - protein, 5 aa, Homo sapiens
AELMR

SEQ ID NO: 15806 - protein, 5 aa, Homo sapiens
FRLEL

SEQ ID NO: 15807 - protein, 5 aa, Homo sapiens
EPSGT

SEQ ID NO: 15808 - protein, 5 aa, Homo sapiens
SESAI

SEQ ID NO: 15809 - protein, 5 aa, Homo sapiens
HLLQK

SEQ ID NO: 15810 - protein, 5 aa, Homo sapiens
INLDT

SEQ ID NO: 15811 - protein, 5 aa, Homo sapiens
IKDEF

SEQ ID NO: 15812 - protein, 5 aa, Homo sapiens
HSTEL

SEQ ID NO: 15813 - protein, 5 aa, Homo sapiens
AYTRF

SEQ ID NO: 15814 - protein, 5 aa, Homo sapiens
YHCLF

SEQ ID NO: 15815 - protein, 5 aa, Homo sapiens
ILGMR

SEQ ID NO: 15816 - protein, 5 aa, Homo sapiens
PESSL

SEQ ID NO: 15817 - protein, 5 aa, Homo sapiens
APKAD

SEQ ID NO: 15818 - protein, 5 aa, Homo sapiens
PATAS

SEQ ID NO: 15819 - protein, 5 aa, Homo sapiens
QSSLH

SEQ ID NO: 15820 - protein, 5 aa, Homo sapiens
KGSKI

SEQ ID NO: 15821 - protein, 5 aa, Homo sapiens
QPAEE

SEQ ID NO: 15822 - protein, 5 aa, Homo sapiens
ALLES

SEQ ID NO: 15823 - protein, 5 aa, Homo sapiens
ITGEK

SEQ ID NO: 15824 - protein, 5 aa, Homo sapiens
ALPPQ

SEQ ID NO: 15825 - protein, 5 aa, Homo sapiens
DNLMI

SEQ ID NO: 15826 - protein, 5 aa, Homo sapiens
RQHAS

SEQ ID NO: 15827 - protein, 5 aa, Homo sapiens
PPPPP

SEQ ID NO: 15828 - protein, 5 aa, Homo sapiens
QRIYE

SEQ ID NO: 15829 - protein, 5 aa, Homo sapiens
LQAPG

SEQ ID NO: 15830 - protein, 5 aa, Homo sapiens
VQLAL

SEQ ID NO: 15831 - protein, 5 aa, Homo sapiens
CVQRE

SEQ ID NO: 15832 - protein, 5 aa, Homo sapiens
SRVLP

SEQ ID NO: 15833 - protein, 5 aa, Homo sapiens
YNPAS

SEQ ID NO: 15834 - protein, 5 aa, Homo sapiens
KTLRL

SEQ ID NO: 15835 - protein, 5 aa, Homo sapiens
KESYI

SEQ ID NO: 15836 - protein, 5 aa, Homo sapiens
LDKEL

SEQ ID NO: 15837 - protein, 5 aa, Homo sapiens
GNTGQ

SEQ ID NO: 15838 - protein, 5 aa, Homo sapiens
PASTC

SEQ ID NO: 15839 - protein, 5 aa, Homo sapiens
QEGAD

SEQ ID NO: 15840 - protein, 5 aa, Homo sapiens
RNPGP

SEQ ID NO: 15841 - protein, 5 aa, Homo sapiens
FGLSI

SEQ ID NO: 15842 - protein, 5 aa, Homo sapiens
INVPA

SEQ ID NO: 15843 - protein, 5 aa, Homo sapiens
KFYKL

SEQ ID NO: 15844 - protein, 5 aa, Homo sapiens
MEETE

SEQ ID NO: 15845 - protein, 5 aa, Homo sapiens
TQRLK

SEQ ID NO: 15846 - protein, 5 aa, Homo sapiens
MKIRN

SEQ ID NO: 15847 - protein, 5 aa, Homo sapiens
SLTQK

SEQ ID NO: 15848 - protein, 5 aa, Homo sapiens
AALAH

SEQ ID NO: 15849 - protein, 5 aa, Homo sapiens
KDLEN

SEQ ID NO: 15850 - protein, 5 aa, Homo sapiens
PKLIS

SEQ ID NO: 15851 - protein, 5 aa, Homo sapiens
SPITR

SEQ ID NO: 15852 - protein, 5 aa, Homo sapiens
APPDV

SEQ ID NO: 15853 - protein, 5 aa, Homo sapiens
DQVAM

SEQ ID NO: 15854 - protein, 5 aa, Homo sapiens
ETIIF

SEQ ID NO: 15855 - protein, 5 aa, Homo sapiens
GSGRR

SEQ ID NO: 15856 - protein, 5 aa, Homo sapiens
HLHKL

SEQ ID NO: 15857 - protein, 5 aa, Homo sapiens
TDVGD

SEQ ID NO: 15858 - protein, 5 aa, Homo sapiens
PSGED

SEQ ID NO: 15859 - protein, 5 aa, Homo sapiens
SNPEP

SEQ ID NO: 15860 - protein, 5 aa, Homo sapiens
AKYSA

SEQ ID NO: 15861 - protein, 5 aa, Homo sapiens
ECYQR

SEQ ID NO: 15862 - protein, 5 aa, Homo sapiens
QIGQL

SEQ ID NO: 15863 - protein, 5 aa, Homo sapiens
KSLFG

SEQ ID NO: 15864 - protein, 5 aa, Homo sapiens
CVSDS

SEQ ID NO: 15865 - protein, 5 aa, Homo sapiens
CSKLT

SEQ ID NO: 15866 - protein, 5 aa, Homo sapiens
LDDST

SEQ ID NO: 15867 - protein, 5 aa, Homo sapiens
LKDYV

SEQ ID NO: 15868 - protein, 5 aa, Homo sapiens
ENYRL

SEQ ID NO: 15869 - protein, 5 aa, Homo sapiens
GGLQQ

SEQ ID NO: 15870 - protein, 5 aa, Homo sapiens
IYSLA

SEQ ID NO: 15871 - protein, 5 aa, Homo sapiens
SHGKS

SEQ ID NO: 15872 - protein, 5 aa, Homo sapiens
LSQNS

SEQ ID NO: 15873 - protein, 5 aa, Homo sapiens
ETEGT

SEQ ID NO: 15874 - protein, 5 aa, Homo sapiens
KVFIA

SEQ ID NO: 15875 - protein, 5 aa, Homo sapiens
SHGTL

SEQ ID NO: 15876 - protein, 5 aa, Homo sapiens
VLKQC

SEQ ID NO: 15877 - protein, 5 aa, Homo sapiens
YTMRV

SEQ ID NO: 15878 - protein, 5 aa, Homo sapiens
LHHRL

SEQ ID NO: 15879 - protein, 5 aa, Homo sapiens
DRGSW

SEQ ID NO: 15880 - protein, 5 aa, Homo sapiens
QSVSN

SEQ ID NO: 15881 - protein, 5 aa, Homo sapiens
EMIIS

SEQ ID NO: 15882 - protein, 5 aa, Homo sapiens
KLLTH

SEQ ID NO: 15883 - protein, 5 aa, Homo sapiens
LLPDE

SEQ ID NO: 15884 - protein, 5 aa, Homo sapiens
LETSV

SEQ ID NO: 15885 - protein, 5 aa, Homo sapiens
IGRFT

SEQ ID NO: 15886 - protein, 5 aa, Homo sapiens
CCTWN

SEQ ID NO: 15887 - protein, 5 aa, Homo sapiens
ISQKV

SEQ ID NO: 15888 - protein, 5 aa, Homo sapiens
SAFRD

SEQ ID NO: 15889 - protein, 5 aa, Homo sapiens
FSLRA

SEQ ID NO: 15890 - protein, 5 aa, Homo sapiens
EELEK

SEQ ID NO: 15891 - protein, 5 aa, Homo sapiens
AFPDS

SEQ ID NO: 15892 - protein, 5 aa, Homo sapiens
MRFTY

SEQ ID NO: 15893 - protein, 5 aa, Homo sapiens
GPPPL

SEQ ID NO: 15894 - protein, 5 aa, Homo sapiens
VLREK

SEQ ID NO: 15895 - protein, 5 aa, Homo sapiens
RVSHE

SEQ ID NO: 15896 - protein, 5 aa, Homo sapiens
LGKNK

SEQ ID NO: 15897 - protein, 5 aa, Homo sapiens
DTQEL

SEQ ID NO: 15898 - protein, 5 aa, Homo sapiens
FHPDV

SEQ ID NO: 15899 - protein, 5 aa, Homo sapiens
FASHV

SEQ ID NO: 15900 - protein, 5 aa, Homo sapiens
LGTPC

SEQ ID NO: 15901 - protein, 5 aa, Homo sapiens
YRQYQ

SEQ ID NO: 15902 - protein, 5 aa, Homo sapiens
HPIPG

SEQ ID NO: 15903 - protein, 5 aa, Homo sapiens
LQLLH

SEQ ID NO: 15904 - protein, 5 aa, Homo sapiens
YDGPL

SEQ ID NO: 15905 - protein, 5 aa, Homo sapiens
LQATL

SEQ ID NO: 15906 - protein, 5 aa, Homo sapiens
GRVFF

SEQ ID NO: 15907 - protein, 5 aa, Homo sapiens
GTLVS

SEQ ID NO: 15908 - protein, 5 aa, Homo sapiens
VKGLF

SEQ ID NO: 15909 - protein, 5 aa, Homo sapiens
LKPTE

SEQ ID NO: 15910 - protein, 5 aa, Homo sapiens
IISQV

SEQ ID NO: 15911 - protein, 5 aa, Homo sapiens
RIQWV

SEQ ID NO: 15912 - protein, 5 aa, Homo sapiens
ILPGI

SEQ ID NO: 15913 - protein, 5 aa, Homo sapiens
LFPHK

SEQ ID NO: 15914 - protein, 5 aa, Homo sapiens
QVSIS

SEQ ID NO: 15915 - protein, 5 aa, Homo sapiens
HAKRA

SEQ ID NO: 15916 - protein, 5 aa, Homo sapiens
YRATN

SEQ ID NO: 15917 - protein, 5 aa, Homo sapiens
SRDEL

SEQ ID NO: 15918 - protein, 5 aa, Homo sapiens
CTASS

SEQ ID NO: 15919 - protein, 5 aa, Homo sapiens
SYFYV

SEQ ID NO: 15920 - protein, 5 aa, Homo sapiens
YPFSQ

SEQ ID NO: 15921 - protein, 5 aa, Homo sapiens
MERLI

SEQ ID NO: 15922 - protein, 5 aa, Homo sapiens
RHLFS

SEQ ID NO: 15923 - protein, 5 aa, Homo sapiens
NEHHS

SEQ ID NO: 15924 - protein, 5 aa, Homo sapiens
LGIPY

SEQ ID NO: 15925 - protein, 5 aa, Homo sapiens
EPLRT

SEQ ID NO: 15926 - protein, 5 aa, Homo sapiens
YPICE

SEQ ID NO: 15927 - protein, 5 aa, Homo sapiens
SCEEK

SEQ ID NO: 15928 - protein, 5 aa, Homo sapiens
YPRCE

SEQ ID NO: 15929 - protein, 5 aa, Homo sapiens
DKTCI

SEQ ID NO: 15930 - protein, 5 aa, Homo sapiens
YPRCE

SEQ ID NO: 15931 - protein, 5 aa, Homo sapiens
TCAKR

SEQ ID NO: 15932 - protein, 5 aa, Homo sapiens
HRKLH

SEQ ID NO: 15933 - protein, 5 aa, Homo sapiens
SHLRF

SEQ ID NO: 15934 - protein, 5 aa, Homo sapiens
RKEFQ

SEQ ID NO: 15935 - protein, 5 aa, Homo sapiens
TLDMI

SEQ ID NO: 15936 - protein, 5 aa, Homo sapiens
AQETK

SEQ ID NO: 15937 - protein, 5 aa, Homo sapiens
ANSLK

SEQ ID NO: 15938 - protein, 5 aa, Homo sapiens
VAIWL

SEQ ID NO: 15939 - protein, 5 aa, Homo sapiens
LKIQK

SEQ ID NO: 15940 - protein, 5 aa, Homo sapiens
TKLCS

SEQ ID NO: 15941 - protein, 5 aa, Homo sapiens
DIYKR

SEQ ID NO: 15942 - protein, 5 aa, Homo sapiens
HNISI

SEQ ID NO: 15943 - protein, 5 aa, Homo sapiens
PSILQ

SEQ ID NO: 15944 - protein, 5 aa, Homo sapiens
SKPKA

SEQ ID NO: 15945 - protein, 5 aa, Homo sapiens
GPEAM

SEQ ID NO: 15946 - protein, 5 aa, Homo sapiens
RSTEL

SEQ ID NO: 15947 - protein, 5 aa, Homo sapiens
SSQSR

SEQ ID NO: 15948 - protein, 5 aa, Homo sapiens
RGNIN

SEQ ID NO: 15949 - protein, 5 aa, Homo sapiens
WYNCP

SEQ ID NO: 15950 - protein, 5 aa, Homo sapiens
KSQCC

SEQ ID NO: 15951 - protein, 5 aa, Homo sapiens
KIFQF

SEQ ID NO: 15952 - protein, 5 aa, Homo sapiens
LNYRI

SEQ ID NO: 15953 - protein, 5 aa, Homo sapiens
TEELE

SEQ ID NO: 15954 - protein, 5 aa, Homo sapiens
GCRRW

SEQ ID NO: 15955 - protein, 5 aa, Homo sapiens
TKEHK

SEQ ID NO: 15956 - protein, 5 aa, Homo sapiens
LPSEE

SEQ ID NO: 15957 - protein, 5 aa, Homo sapiens
EKDEL

SEQ ID NO: 15958 - protein, 5 aa, Homo sapiens
SRDEL

SEQ ID NO: 15959 - protein, 5 aa, Homo sapiens
RKKGK

SEQ ID NO: 15960 - protein, 5 aa, Homo sapiens
RPQAM

SEQ ID NO: 15961 - protein, 5 aa, Homo sapiens
GGGGY

SEQ ID NO: 15962 - protein, 5 aa, Homo sapiens
EPSHT

SEQ ID NO: 15963 - protein, 5 aa, Homo sapiens
ASPGC

SEQ ID NO: 15964 - protein, 5 aa, Homo sapiens
IKKEK

SEQ ID NO: 15965 - protein, 5 aa, Homo sapiens
GRTLG

SEQ ID NO: 15966 - protein, 5 aa, Homo sapiens
HYCMD

SEQ ID NO: 15967 - protein, 5 aa, Homo sapiens
PKSSP

SEQ ID NO: 15968 - protein, 5 aa, Homo sapiens
CPCLK

SEQ ID NO: 15969 - protein, 5 aa, Homo sapiens
KPEEN

SEQ ID NO: 15970 - protein, 5 aa, Homo sapiens
EGLKL

SEQ ID NO: 15971 - protein, 5 aa, Homo sapiens
AIVAF

SEQ ID NO: 15972 - protein, 5 aa, Homo sapiens
PTPDR

SEQ ID NO: 15973 - protein, 5 aa, Homo sapiens
FLVFG

SEQ ID NO: 15974 - protein, 5 aa, Homo sapiens
DEANT

SEQ ID NO: 15975 - protein, 5 aa, Homo sapiens
QQLEK

SEQ ID NO: 15976 - protein, 5 aa, Homo sapiens
TTGKA

SEQ ID NO: 15977 - protein, 5 aa, Homo sapiens
PQLTP

SEQ ID NO: 15978 - protein, 5 aa, Homo sapiens
GHPAA

SEQ ID NO: 15979 - protein, 5 aa, Homo sapiens
RMLLV

SEQ ID NO: 15980 - protein, 5 aa, Homo sapiens
HSTKF

SEQ ID NO: 15981 - protein, 5 aa, Homo sapiens
DSPML

SEQ ID NO: 15982 - protein, 5 aa, Homo sapiens
PKKGH

SEQ ID NO: 15983 - protein, 5 aa, Homo sapiens
CRYVF

SEQ ID NO: 15984 - protein, 5 aa, Homo sapiens
DVVQR

SEQ ID NO: 15985 - protein, 5 aa, Homo sapiens
NYFLS

SEQ ID NO: 15986 - protein, 5 aa, Homo sapiens
TTGRE

SEQ ID NO: 15987 - protein, 5 aa, Homo sapiens
LMTFE

SEQ ID NO: 15988 - protein, 5 aa, Homo sapiens
RTLEG

SEQ ID NO: 15989 - protein, 5 aa, Homo sapiens
FPFRQ

SEQ ID NO: 15990 - protein, 5 aa, Homo sapiens
SRVSC

SEQ ID NO: 15991 - protein, 5 aa, Homo sapiens
VLEAY

SEQ ID NO: 15992 - protein, 5 aa, Homo sapiens
ILLQD

SEQ ID NO: 15993 - protein, 5 aa, Homo sapiens
AEENQ

SEQ ID NO: 15994 - protein, 5 aa, Homo sapiens
PFSHL

SEQ ID NO: 15995 - protein, 5 aa, Homo sapiens
VLELV

SEQ ID NO: 15996 - protein, 5 aa, Homo sapiens
TLESH

SEQ ID NO: 15997 - protein, 5 aa, Homo sapiens
TPSIP

SEQ ID NO: 15998 - protein, 5 aa, Homo sapiens
QRATW

SEQ ID NO: 15999 - protein, 5 aa, Homo sapiens
GDTEF

SEQ ID NO: 16000 - protein, 5 aa, Homo sapiens
SSMEK

SEQ ID NO: 16001 - protein, 5 aa, Homo sapiens
NSCSI

SEQ ID NO: 16002 - protein, 5 aa, Homo sapiens
NPCVK

SEQ ID NO: 16003 - protein, 5 aa, Homo sapiens
TTGPD

SEQ ID NO: 16004 - protein, 5 aa, Homo sapiens
HPQII

SEQ ID NO: 16005 - protein, 5 aa, Homo sapiens
DDTSN

SEQ ID NO: 16006 - protein, 5 aa, Homo sapiens
RQKMS

SEQ ID NO: 16007 - protein, 5 aa, Homo sapiens
LAWTL

SEQ ID NO: 16008 - protein, 5 aa, Homo sapiens
GLYKL

SEQ ID NO: 16009 - protein, 5 aa, Homo sapiens
VSGHI

SEQ ID NO: 16010 - protein, 5 aa, Homo sapiens
KTTRQ

SEQ ID NO: 16011 - protein, 5 aa, Homo sapiens
KDLLK

SEQ ID NO: 16012 - protein, 5 aa, Homo sapiens
SKEFS

SEQ ID NO: 16013 - protein, 5 aa, Homo sapiens
SLWRG

SEQ ID NO: 16014 - protein, 5 aa, Homo sapiens
FLVLT

SEQ ID NO: 16015 - protein, 5 aa, Homo sapiens
QDLRS

SEQ ID NO: 16016 - protein, 5 aa, Homo sapiens
VPTVN

SEQ ID NO: 16017 - protein, 5 aa, Homo sapiens
AALAT

SEQ ID NO: 16018 - protein, 5 aa, Homo sapiens
WMFAL

SEQ ID NO: 16019 - protein, 5 aa, Homo sapiens
EDNNW

SEQ ID NO: 16020 - protein, 5 aa, Homo sapiens
EGDSP

SEQ ID NO: 16021 - protein, 5 aa, Homo sapiens
GCDIY

SEQ ID NO: 16022 - protein, 5 aa, Homo sapiens
VTLIE

SEQ ID NO: 16023 - protein, 5 aa, Homo sapiens
TDHYN

SEQ ID NO: 16024 - protein, 5 aa, Homo sapiens
KILDN

SEQ ID NO: 16025 - protein, 5 aa, Homo sapiens
IEVKS

SEQ ID NO: 16026 - protein, 5 aa, Homo sapiens
EFANV

SEQ ID NO: 16027 - protein, 5 aa, Homo sapiens
VTLTG

SEQ ID NO: 16028 - protein, 5 aa, Homo sapiens
VTLTG

SEQ ID NO: 16029 - protein, 5 aa, Homo sapiens
SSLDG

SEQ ID NO: 16030 - protein, 5 aa, Homo sapiens
STQVE

SEQ ID NO: 16031 - protein, 5 aa, Homo sapiens
TEIKE

SEQ ID NO: 16032 - protein, 5 aa, Homo sapiens
NEDEE

SEQ ID NO: 16033 - protein, 5 aa, Homo sapiens
VDNHF

SEQ ID NO: 16034 - protein, 5 aa, Homo sapiens
QDTKM

SEQ ID NO: 16035 - protein, 5 aa, Homo sapiens
TDSFL

SEQ ID NO: 16036 - protein, 5 aa, Homo sapiens
APEEG

SEQ ID NO: 16037 - protein, 5 aa, Homo sapiens
ASKAQ

SEQ ID NO: 16038 - protein, 5 aa, Homo sapiens
DHLDQ

SEQ ID NO: 16039 - protein, 5 aa, Homo sapiens
FSSLS

SEQ ID NO: 16040 - protein, 5 aa, Homo sapiens
GLLLC

SEQ ID NO: 16041 - protein, 5 aa, Homo sapiens
MAESN

SEQ ID NO: 16042 - protein, 5 aa, Homo sapiens
SSRPH

SEQ ID NO: 16043 - protein, 5 aa, Homo sapiens
SGKFS

SEQ ID NO: 16044 - protein, 5 aa, Homo sapiens
PKCCH

SEQ ID NO: 16045 - protein, 5 aa, Homo sapiens
GNMYF

SEQ ID NO: 16046 - protein, 5 aa, Homo sapiens
QELIK

SEQ ID NO: 16047 - protein, 5 aa, Homo sapiens
VPQCA

SEQ ID NO: 16048 - protein, 5 aa, Homo sapiens
QQGDE

SEQ ID NO: 16049 - protein, 5 aa, Homo sapiens
CSLSW

SEQ ID NO: 16050 - protein, 5 aa, Homo sapiens
VDVLP

SEQ ID NO: 16051 - protein, 5 aa, Homo sapiens
QKESE

SEQ ID NO: 16052 - protein, 5 aa, Homo sapiens
PVLSS

SEQ ID NO: 16053 - protein, 5 aa, Homo sapiens
AYLCL

SEQ ID NO: 16054 - protein, 5 aa, Homo sapiens
PESLQ

SEQ ID NO: 16055 - protein, 5 aa, Homo sapiens
QTGKI

SEQ ID NO: 16056 - protein, 5 aa, Homo sapiens
TPVES

SEQ ID NO: 16057 - protein, 5 aa, Homo sapiens
DQNRI

SEQ ID NO: 16058 - protein, 5 aa, Homo sapiens
STKSL

SEQ ID NO: 16059 - protein, 5 aa, Homo sapiens
VKTNI

SEQ ID NO: 16060 - protein, 5 aa, Homo sapiens
DPQDK

SEQ ID NO: 16061 - protein, 5 aa, Homo sapiens
RPAKS

SEQ ID NO: 16062 - protein, 5 aa, Homo sapiens
GLAAM

SEQ ID NO: 16063 - protein, 5 aa, Homo sapiens
YGDMA

SEQ ID NO: 16064 - protein, 5 aa, Homo sapiens
QEICS

SEQ ID NO: 16065 - protein, 5 aa, Homo sapiens
SITVG

SEQ ID NO: 16066 - protein, 5 aa, Homo sapiens
QPATQ

SEQ ID NO: 16067 - protein, 5 aa, Homo sapiens
TTMPS

SEQ ID NO: 16068 - protein, 5 aa, Homo sapiens
GEVDR

SEQ ID NO: 16069 - protein, 5 aa, Homo sapiens
WAGRK

SEQ ID NO: 16070 - protein, 5 aa, Homo sapiens
EKCNQ

SEQ ID NO: 16071 - protein, 5 aa, Homo sapiens
LQALP

SEQ ID NO: 16072 - protein, 5 aa, Homo sapiens
GHPLS

SEQ ID NO: 16073 - protein, 5 aa, Homo sapiens
GVLVS

SEQ ID NO: 16074 - protein, 5 aa, Homo sapiens
ILDFI

SEQ ID NO: 16075 - protein, 5 aa, Homo sapiens
RGHLV

SEQ ID NO: 16076 - protein, 5 aa, Homo sapiens
KGEGL

SEQ ID NO: 16077 - protein, 5 aa, Homo sapiens
KNDSN

SEQ ID NO: 16078 - protein, 5 aa, Homo sapiens
LEKES

SEQ ID NO: 16079 - protein, 5 aa, Homo sapiens
LLFYR

SEQ ID NO: 16080 - protein, 5 aa, Homo sapiens
FDVYS

SEQ ID NO: 16081 - protein, 5 aa, Homo sapiens
YENVI

SEQ ID NO: 16082 - protein, 5 aa, Homo sapiens
GLLLT

SEQ ID NO: 16083 - protein, 5 aa, Homo sapiens
LDNVV

SEQ ID NO: 16084 - protein, 5 aa, Homo sapiens
LPVTQ

SEQ ID NO: 16085 - protein, 5 aa, Homo sapiens
SETSV

SEQ ID NO: 16086 - protein, 5 aa, Homo sapiens
PLQFR

SEQ ID NO: 16087 - protein, 5 aa, Homo sapiens
QCLIM

SEQ ID NO: 16088 - protein, 5 aa, Homo sapiens
PPKKA

SEQ ID NO: 16089 - protein, 5 aa, Homo sapiens
DDDDD

SEQ ID NO: 16090 - protein, 5 aa, Homo sapiens
RETYY

SEQ ID NO: 16091 - protein, 5 aa, Homo sapiens
SESKV

SEQ ID NO: 16092 - protein, 5 aa, Homo sapiens
RISNV

SEQ ID NO: 16093 - protein, 5 aa, Homo sapiens
RIKYD

SEQ ID NO: 16094 - protein, 5 aa, Homo sapiens
GSSPA

SEQ ID NO: 16095 - protein, 5 aa, Homo sapiens
PRQIL

SEQ ID NO: 16096 - protein, 5 aa, Homo sapiens
ATSVN

SEQ ID NO: 16097 - protein, 5 aa, Homo sapiens
NGLLV

SEQ ID NO: 16098 - protein, 5 aa, Homo sapiens
EEVLC

SEQ ID NO: 16099 - protein, 5 aa, Homo sapiens
YQRTK

SEQ ID NO: 16100 - protein, 5 aa, Homo sapiens
NPKNN

SEQ ID NO: 16101 - protein, 5 aa, Homo sapiens
LGSKS

SEQ ID NO: 16102 - protein, 5 aa, Homo sapiens
ENNRK

SEQ ID NO: 16103 - protein, 5 aa, Homo sapiens
KEYFI

SEQ ID NO: 16104 - protein, 5 aa, Homo sapiens
SSQLV

SEQ ID NO: 16105 - protein, 5 aa, Homo sapiens
PMNVN

SEQ ID NO: 16106 - protein, 5 aa, Homo sapiens
SKLLV

SEQ ID NO: 16107 - protein, 5 aa, Homo sapiens
GWAGK

SEQ ID NO: 16108 - protein, 5 aa, Homo sapiens
NKPGG

SEQ ID NO: 16109 - protein, 5 aa, Homo sapiens
SYFGN

SEQ ID NO: 16110 - protein, 5 aa, Homo sapiens
VALKK

SEQ ID NO: 16111 - protein, 5 aa, Homo sapiens
SCPAN

SEQ ID NO: 16112 - protein, 5 aa, Homo sapiens
LKLYN

SEQ ID NO: 16113 - protein, 5 aa, Homo sapiens
CLNSK

SEQ ID NO: 16114 - protein, 5 aa, Homo sapiens
LNQLW

SEQ ID NO: 16115 - protein, 5 aa, Homo sapiens
YQNIP

SEQ ID NO: 16116 - protein, 5 aa, Homo sapiens
IINIC

SEQ ID NO: 16117 - protein, 5 aa, Homo sapiens
YQGVL

SEQ ID NO: 16118 - protein, 5 aa, Homo sapiens
MQTHV

SEQ ID NO: 16119 - protein, 5 aa, Homo sapiens
VICSG

SEQ ID NO: 16120 - protein, 5 aa, Homo sapiens
YEDAM

SEQ ID NO: 16121 - protein, 5 aa, Homo sapiens
CLCNT

SEQ ID NO: 16122 - protein, 5 aa, Homo sapiens
AAADA

SEQ ID NO: 16123 - protein, 5 aa, Homo sapiens
ASPGP

SEQ ID NO: 16124 - protein, 5 aa, Homo sapiens
GGPGH

SEQ ID NO: 16125 - protein, 5 aa, Homo sapiens
DHESL

SEQ ID NO: 16126 - protein, 5 aa, Homo sapiens
YLESS

SEQ ID NO: 16127 - protein, 5 aa, Homo sapiens
ETEDS

SEQ ID NO: 16128 - protein, 5 aa, Homo sapiens
VYVRE

SEQ ID NO: 16129 - protein, 5 aa, Homo sapiens
SSGED

SEQ ID NO: 16130 - protein, 5 aa, Homo sapiens
QKKRD

SEQ ID NO: 16131 - protein, 5 aa, Homo sapiens
VYRLQ

SEQ ID NO: 16132 - protein, 5 aa, Homo sapiens
ICTIV

SEQ ID NO: 16133 - protein, 5 aa, Homo sapiens
GLDSL

SEQ ID NO: 16134 - protein, 5 aa, Homo sapiens
GAWRA

SEQ ID NO: 16135 - protein, 5 aa, Homo sapiens
EKHQK

SEQ ID NO: 16136 - protein, 5 aa, Homo sapiens
PQFSK

SEQ ID NO: 16137 - protein, 5 aa, Homo sapiens
DAGQE

SEQ ID NO: 16138 - protein, 5 aa, Homo sapiens
LFFVL

SEQ ID NO: 16139 - protein, 5 aa, Homo sapiens
QEGGV

SEQ ID NO: 16140 - protein, 5 aa, Homo sapiens
GKFNK

SEQ ID NO: 16141 - protein, 5 aa, Homo sapiens
NCSIM

SEQ ID NO: 16142 - protein, 5 aa, Homo sapiens
VRKEK

SEQ ID NO: 16143 - protein, 5 aa, Homo sapiens
GSQLS

SEQ ID NO: 16144 - protein, 5 aa, Homo sapiens
KTKKN

SEQ ID NO: 16145 - protein, 5 aa, Homo sapiens
TVTEV

SEQ ID NO: 16146 - protein, 5 aa, Homo sapiens
VASES

SEQ ID NO: 16147 - protein, 5 aa, Homo sapiens
RRRYL

SEQ ID NO: 16148 - protein, 5 aa, Homo sapiens
RGTPG

SEQ ID NO: 16149 - protein, 5 aa, Homo sapiens
FWMAP

SEQ ID NO: 16150 - protein, 5 aa, Homo sapiens
KDSVT

SEQ ID NO: 16151 - protein, 5 aa, Homo sapiens
SLSEY

SEQ ID NO: 16152 - protein, 5 aa, Homo sapiens
KKSRG

SEQ ID NO: 16153 - protein, 5 aa, Homo sapiens
EELDE

SEQ ID NO: 16154 - protein, 5 aa, Homo sapiens
ISGFL

SEQ ID NO: 16155 - protein, 5 aa, Homo sapiens
SFPAG

SEQ ID NO: 16156 - protein, 5 aa, Homo sapiens
NSFRK

SEQ ID NO: 16157 - protein, 5 aa, Homo sapiens
TSLVL

SEQ ID NO: 16158 - protein, 5 aa, Homo sapiens
VWAFD

SEQ ID NO: 16159 - protein, 5 aa, Homo sapiens
LSANM

SEQ ID NO: 16160 - protein, 5 aa, Homo sapiens
RDISR

SEQ ID NO: 16161 - protein, 5 aa, Homo sapiens
EVGAF

SEQ ID NO: 16162 - protein, 5 aa, Homo sapiens
RETGL

SEQ ID NO: 16163 - protein, 5 aa, Homo sapiens
QGLQA

SEQ ID NO: 16164 - protein, 5 aa, Homo sapiens
EDEEE

SEQ ID NO: 16165 - protein, 5 aa, Homo sapiens
LQGRV

SEQ ID NO: 16166 - protein, 5 aa, Homo sapiens
RGLRF

SEQ ID NO: 16167 - protein, 5 aa, Homo sapiens
EELQC

SEQ ID NO: 16168 - protein, 5 aa, Homo sapiens
WLLQT

SEQ ID NO: 16169 - protein, 5 aa, Homo sapiens
LLQTP

SEQ ID NO: 16170 - protein, 5 aa, Homo sapiens
TFLAS

SEQ ID NO: 16171 - protein, 5 aa, Homo sapiens
LLRIL

SEQ ID NO: 16172 - protein, 5 aa, Homo sapiens
MYMSK

SEQ ID NO: 16173 - protein, 5 aa, Homo sapiens
HPPPK

SEQ ID NO: 16174 - protein, 5 aa, Homo sapiens
KELLD

SEQ ID NO: 16175 - protein, 5 aa, Homo sapiens
IKHNY

SEQ ID NO: 16176 - protein, 5 aa, Homo sapiens
QNEEK

SEQ ID NO: 16177 - protein, 5 aa, Homo sapiens
VERKL

SEQ ID NO: 16178 - protein, 5 aa, Homo sapiens
PLLDS

SEQ ID NO: 16179 - protein, 5 aa, Homo sapiens
AANDG

SEQ ID NO: 16180 - protein, 5 aa, Homo sapiens
EIREE

SEQ ID NO: 16181 - protein, 5 aa, Homo sapiens
IRSRL

SEQ ID NO: 16182 - protein, 5 aa, Homo sapiens
APSSK

SEQ ID NO: 16183 - protein, 5 aa, Homo sapiens
YFFPR

SEQ ID NO: 16184 - protein, 5 aa, Homo sapiens
KPLKG

SEQ ID NO: 16185 - protein, 5 aa, Homo sapiens
NCITQ

SEQ ID NO: 16186 - protein, 5 aa, Homo sapiens
QRLGK

SEQ ID NO: 16187 - protein, 5 aa, Homo sapiens
HKKSY

SEQ ID NO: 16188 - protein, 5 aa, Homo sapiens
GDGSD

SEQ ID NO: 16189 - protein, 5 aa, Homo sapiens
DEAKL

SEQ ID NO: 16190 - protein, 5 aa, Homo sapiens
LESTL

SEQ ID NO: 16191 - protein, 5 aa, Homo sapiens
YVERF

SEQ ID NO: 16192 - protein, 5 aa, Homo sapiens
DMTSI

SEQ ID NO: 16193 - protein, 5 aa, Homo sapiens
GMFQL

SEQ ID NO: 16194 - protein, 5 aa, Homo sapiens
AAGGT

SEQ ID NO: 16195 - protein, 5 aa, Homo sapiens
DCLAA

SEQ ID NO: 16196 - protein, 5 aa, Homo sapiens
NFKDQ

SEQ ID NO: 16197 - protein, 5 aa, Homo sapiens
IYHPQ

SEQ ID NO: 16198 - protein, 5 aa, Homo sapiens
QAKAK

SEQ ID NO: 16199 - protein, 5 aa, Homo sapiens
WSIRH

SEQ ID NO: 16200 - protein, 5 aa, Homo sapiens
SAAQP

SEQ ID NO: 16201 - protein, 5 aa, Homo sapiens
RRKQH

SEQ ID NO: 16202 - protein, 5 aa, Homo sapiens
TGDAF

SEQ ID NO: 16203 - protein, 5 aa, Homo sapiens
KATFQ

SEQ ID NO: 16204 - protein, 5 aa, Homo sapiens
KCSLG

SEQ ID NO: 16205 - protein, 5 aa, Homo sapiens
AEKIP

SEQ ID NO: 16206 - protein, 5 aa, Homo sapiens
DGWFA

SEQ ID NO: 16207 - protein, 5 aa, Homo sapiens
HHSCF

SEQ ID NO: 16208 - protein, 5 aa, Homo sapiens
KVKKL

SEQ ID NO: 16209 - protein, 5 aa, Homo sapiens
SDSAD

SEQ ID NO: 16210 - protein, 5 aa, Homo sapiens
AGDAL

SEQ ID NO: 16211 - protein, 5 aa, Homo sapiens
CCVVQ

SEQ ID NO: 16212 - protein, 5 aa, Homo sapiens
IELKP

SEQ ID NO: 16213 - protein, 5 aa, Homo sapiens
TAHNM

SEQ ID NO: 16214 - protein, 5 aa, Homo sapiens
YRGKK

SEQ ID NO: 16215 - protein, 5 aa, Homo sapiens
STPEL

SEQ ID NO: 16216 - protein, 5 aa, Homo sapiens
GFQSG

SEQ ID NO: 16217 - protein, 5 aa, Homo sapiens
TQFET

SEQ ID NO: 16218 - protein, 5 aa, Homo sapiens
RFQSG

SEQ ID NO: 16219 - protein, 5 aa, Homo sapiens
NNFIR

SEQ ID NO: 16220 - protein, 5 aa, Homo sapiens
AEAAE

SEQ ID NO: 16221 - protein, 5 aa, Homo sapiens
STSTF

SEQ ID NO: 16222 - protein, 5 aa, Homo sapiens
LRKMR

SEQ ID NO: 16223 - protein, 5 aa, Homo sapiens
DSEDI

SEQ ID NO: 16224 - protein, 5 aa, Homo sapiens
ISGQK

SEQ ID NO: 16225 - protein, 5 aa, Homo sapiens
EMHPK

SEQ ID NO: 16226 - protein, 5 aa, Homo sapiens
LSIAM

SEQ ID NO: 16227 - protein, 5 aa, Homo sapiens
PGENL

SEQ ID NO: 16228 - protein, 5 aa, Homo sapiens
GEMGS

SEQ ID NO: 16229 - protein, 5 aa, Homo sapiens
DGILF

SEQ ID NO: 16230 - protein, 5 aa, Homo sapiens
APPPG

SEQ ID NO: 16231 - protein, 5 aa, Homo sapiens
TAYIK

SEQ ID NO: 16232 - protein, 5 aa, Homo sapiens
SSTRG

SEQ ID NO: 16233 - protein, 5 aa, Homo sapiens
GSPGK

SEQ ID NO: 16234 - protein, 5 aa, Homo sapiens
KSCVC

SEQ ID NO: 16235 - protein, 5 aa, Homo sapiens
FWENS

SEQ ID NO: 16236 - protein, 5 aa, Homo sapiens
QQSSS

SEQ ID NO: 16237 - protein, 5 aa, Homo sapiens
CPDRP

SEQ ID NO: 16238 - protein, 5 aa, Homo sapiens
PPCSQ

SEQ ID NO: 16239 - protein, 5 aa, Homo sapiens
EALKG

SEQ ID NO: 16240 - protein, 5 aa, Homo sapiens
SGGSQ

SEQ ID NO: 16241 - protein, 5 aa, Homo sapiens
SGGSQ

SEQ ID NO: 16242 - protein, 5 aa, Homo sapiens
SKGYG

SEQ ID NO: 16243 - protein, 5 aa, Homo sapiens
ESHKE

SEQ ID NO: 16244 - protein, 5 aa, Homo sapiens
HTHKE

SEQ ID NO: 16245 - protein, 5 aa, Homo sapiens
TWPSK

SEQ ID NO: 16246 - protein, 5 aa, Homo sapiens
PGKGK

SEQ ID NO: 16247 - protein, 5 aa, Homo sapiens
CPPPE

SEQ ID NO: 16248 - protein, 5 aa, Homo sapiens
PPKSK

SEQ ID NO: 16249 - protein, 5 aa, Homo sapiens
GIALS

SEQ ID NO: 16250 - protein, 5 aa, Homo sapiens
PPKHK

SEQ ID NO: 16251 - protein, 5 aa, Homo sapiens
SRPSK

SEQ ID NO: 16252 - protein, 5 aa, Homo sapiens
SGGCC

SEQ ID NO: 16253 - protein, 5 aa, Homo sapiens
SGGCC

SEQ ID NO: 16254 - protein, 5 aa, Homo sapiens
KSAYF

SEQ ID NO: 16255 - protein, 5 aa, Homo sapiens
SGDCC

SEQ ID NO: 16256 - protein, 5 aa, Homo sapiens
SGGCC

SEQ ID NO: 16257 - protein, 5 aa, Homo sapiens
SGGCC

SEQ ID NO: 16258 - protein, 5 aa, Homo sapiens
SGGCC

SEQ ID NO: 16259 - protein, 5 aa, Homo sapiens
PHGCC

SEQ ID NO: 16260 - protein, 5 aa, Homo sapiens
SGGCC

SEQ ID NO: 16261 - protein, 5 aa, Homo sapiens
SGGCC

SEQ ID NO: 16262 - protein, 5 aa, Homo sapiens
CCSGC

SEQ ID NO: 16263 - protein, 5 aa, Homo sapiens
HINST

SEQ ID NO: 16264 - protein, 5 aa, Homo sapiens
YYYYE

SEQ ID NO: 16265 - protein, 5 aa, Homo sapiens
CYFYQ

SEQ ID NO: 16266 - protein, 5 aa, Homo sapiens
SQYRP

SEQ ID NO: 16267 - protein, 5 aa, Homo sapiens
STTKQ

SEQ ID NO: 16268 - protein, 5 aa, Homo sapiens
STLNM

SEQ ID NO: 16269 - protein, 5 aa, Homo sapiens
QKGKK

SEQ ID NO: 16270 - protein, 5 aa, Homo sapiens
AKSLT

SEQ ID NO: 16271 - protein, 5 aa, Homo sapiens
EESPQ

SEQ ID NO: 16272 - protein, 5 aa, Homo sapiens
TAKLF

SEQ ID NO: 16273 - protein, 5 aa, Homo sapiens
SSLES

SEQ ID NO: 16274 - protein, 5 aa, Homo sapiens
DDYLL

SEQ ID NO: 16275 - protein, 5 aa, Homo sapiens
PSEPP

SEQ ID NO: 16276 - protein, 5 aa, Homo sapiens
TSPQI

SEQ ID NO: 16277 - protein, 5 aa, Homo sapiens
DKKAA

SEQ ID NO: 16278 - protein, 5 aa, Homo sapiens
PSLAF

SEQ ID NO: 16279 - protein, 5 aa, Homo sapiens
RDVAT

SEQ ID NO: 16280 - protein, 5 aa, Homo sapiens
QHADK

SEQ ID NO: 16281 - protein, 5 aa, Homo sapiens
TILSF

SEQ ID NO: 16282 - protein, 5 aa, Homo sapiens
KGTNV

SEQ ID NO: 16283 - protein, 5 aa, Homo sapiens
RVVET

SEQ ID NO: 16284 - protein, 5 aa, Homo sapiens
SDSII

SEQ ID NO: 16285 - protein, 5 aa, Homo sapiens
YVNRD

SEQ ID NO: 16286 - protein, 5 aa, Homo sapiens
RIKKN

SEQ ID NO: 16287 - protein, 5 aa, Homo sapiens
KSPCT

SEQ ID NO: 16288 - protein, 5 aa, Homo sapiens
SDIWI

SEQ ID NO: 16289 - protein, 5 aa, Homo sapiens
TQMLP

SEQ ID NO: 16290 - protein, 5 aa, Homo sapiens
IDAEY

SEQ ID NO: 16291 - protein, 5 aa, Homo sapiens
VSELL

SEQ ID NO: 16292 - protein, 5 aa, Homo sapiens
EEDKK

SEQ ID NO: 16293 - protein, 5 aa, Homo sapiens
QQQQS

SEQ ID NO: 16294 - protein, 5 aa, Homo sapiens
PLSTG

SEQ ID NO: 16295 - protein, 5 aa, Homo sapiens
SEFTH

SEQ ID NO: 16296 - protein, 5 aa, Homo sapiens
SNGER

SEQ ID NO: 16297 - protein, 5 aa, Homo sapiens
KIVIK

SEQ ID NO: 16298 - protein, 5 aa, Homo sapiens
INEGL

SEQ ID NO: 16299 - protein, 5 aa, Homo sapiens
EATSD

SEQ ID NO: 16300 - protein, 5 aa, Homo sapiens
IPNSE

SEQ ID NO: 16301 - protein, 5 aa, Homo sapiens
INEGL

SEQ ID NO: 16302 - protein, 5 aa, Homo sapiens
KLQNY

SEQ ID NO: 16303 - protein, 5 aa, Homo sapiens
DLPLD

SEQ ID NO: 16304 - protein, 5 aa, Homo sapiens
EIFKL

SEQ ID NO: 16305 - protein, 5 aa, Homo sapiens
EEEPR

SEQ ID NO: 16306 - protein, 5 aa, Homo sapiens
DEGKL

SEQ ID NO: 16307 - protein, 5 aa, Homo sapiens
QAHRY

SEQ ID NO: 16308 - protein, 5 aa, Homo sapiens
GRFNF

SEQ ID NO: 16309 - protein, 5 aa, Homo sapiens
ATVSS

SEQ ID NO: 16310 - protein, 5 aa, Homo sapiens
SGLGE

SEQ ID NO: 16311 - protein, 5 aa, Homo sapiens
ELDLL

SEQ ID NO: 16312 - protein, 5 aa, Homo sapiens
PKSNL

SEQ ID NO: 16313 - protein, 5 aa, Homo sapiens
GSGGT

SEQ ID NO: 16314 - protein, 5 aa, Homo sapiens
RAEDM

SEQ ID NO: 16315 - protein, 5 aa, Homo sapiens
HRKND

SEQ ID NO: 16316 - protein, 5 aa, Homo sapiens
GDPYA

SEQ ID NO: 16317 - protein, 5 aa, Homo sapiens
FRADW

SEQ ID NO: 16318 - protein, 5 aa, Homo sapiens
IKTHQ

SEQ ID NO: 16319 - protein, 5 aa, Homo sapiens
IMQEY

SEQ ID NO: 16320 - protein, 5 aa, Homo sapiens
RGRLL

SEQ ID NO: 16321 - protein, 5 aa, Homo sapiens
TAVPL

SEQ ID NO: 16322 - protein, 5 aa, Homo sapiens
DRTKK

SEQ ID NO: 16323 - protein, 5 aa, Homo sapiens
KSSDI

SEQ ID NO: 16324 - protein, 5 aa, Homo sapiens
EEIDP

SEQ ID NO: 16325 - protein, 5 aa, Homo sapiens
SYPEI

SEQ ID NO: 16326 - protein, 5 aa, Homo sapiens
PVSDV

SEQ ID NO: 16327 - protein, 5 aa, Homo sapiens
IFPAS

SEQ ID NO: 16328 - protein, 5 aa, Homo sapiens
EEDDD

SEQ ID NO: 16329 - protein, 5 aa, Homo sapiens
AFNKS

SEQ ID NO: 16330 - protein, 5 aa, Homo sapiens
FVIFL

SEQ ID NO: 16331 - protein, 5 aa, Homo sapiens
KQAKF

SEQ ID NO: 16332 - protein, 5 aa, Homo sapiens
QKPSA

SEQ ID NO: 16333 - protein, 5 aa, Homo sapiens
AYLIR

SEQ ID NO: 16334 - protein, 5 aa, Homo sapiens
RTGDL

SEQ ID NO: 16335 - protein, 5 aa, Homo sapiens
VTRFS

SEQ ID NO: 16336 - protein, 5 aa, Homo sapiens
VSLKQ

SEQ ID NO: 16337 - protein, 5 aa, Homo sapiens
EPKEE

SEQ ID NO: 16338 - protein, 5 aa, Homo sapiens
VINVV

SEQ ID NO: 16339 - protein, 5 aa, Homo sapiens
AEEIF

SEQ ID NO: 16340 - protein, 5 aa, Homo sapiens
MVLYT

SEQ ID NO: 16341 - protein, 5 aa, Homo sapiens
FPPRY

SEQ ID NO: 16342 - protein, 5 aa, Homo sapiens
CTSGH

SEQ ID NO: 16343 - protein, 5 aa, Homo sapiens
EQPQH

SEQ ID NO: 16344 - protein, 5 aa, Homo sapiens
FPNPK

SEQ ID NO: 16345 - protein, 5 aa, Homo sapiens
NPAAP

SEQ ID NO: 16346 - protein, 5 aa, Homo sapiens
SYQTQ

SEQ ID NO: 16347 - protein, 5 aa, Homo sapiens
GMYFM

SEQ ID NO: 16348 - protein, 5 aa, Homo sapiens
RIYNT

SEQ ID NO: 16349 - protein, 5 aa, Homo sapiens
STGSS

SEQ ID NO: 16350 - protein, 5 aa, Homo sapiens
IPPED

SEQ ID NO: 16351 - protein, 5 aa, Homo sapiens
VDWIP

SEQ ID NO: 16352 - protein, 5 aa, Homo sapiens
ATTEA

SEQ ID NO: 16353 - protein, 5 aa, Homo sapiens
LTMVA

SEQ ID NO: 16354 - protein, 5 aa, Homo sapiens
TAQFK

SEQ ID NO: 16355 - protein, 5 aa, Homo sapiens
SASRR

SEQ ID NO: 16356 - protein, 5 aa, Homo sapiens
LVHRF

SEQ ID NO: 16357 - protein, 5 aa, Homo sapiens
KETMA

SEQ ID NO: 16358 - protein, 5 aa, Homo sapiens
WITRC

SEQ ID NO: 16359 - protein, 5 aa, Homo sapiens
TTVRR

SEQ ID NO: 16360 - protein, 5 aa, Homo sapiens
GQVLQ

SEQ ID NO: 16361 - protein, 5 aa, Homo sapiens
TLGTP

SEQ ID NO: 16362 - protein, 5 aa, Homo sapiens
SRGYR

SEQ ID NO: 16363 - protein, 5 aa, Homo sapiens
YGFGG

SEQ ID NO: 16364 - protein, 5 aa, Homo sapiens
RGERA

SEQ ID NO: 16365 - protein, 5 aa, Homo sapiens
KAKGK

SEQ ID NO: 16366 - protein, 5 aa, Homo sapiens
KAKGK

SEQ ID NO: 16367 - protein, 5 aa, Homo sapiens
RGERA

SEQ ID NO: 16368 - protein, 5 aa, Homo sapiens
YGFGG

SEQ ID NO: 16369 - protein, 5 aa, Homo sapiens
YTSSK

SEQ ID NO: 16370 - protein, 5 aa, Homo sapiens
PQGAT

SEQ ID NO: 16371 - protein, 5 aa, Homo sapiens
NMGYM

SEQ ID NO: 16372 - protein, 5 aa, Homo sapiens
GGTVA

SEQ ID NO: 16373 - protein, 5 aa, Homo sapiens
EECIR

SEQ ID NO: 16374 - protein, 5 aa, Homo sapiens
RGERA

SEQ ID NO: 16375 - protein, 5 aa, Homo sapiens
PQGAT

SEQ ID NO: 16376 - protein, 5 aa, Homo sapiens
QHLEE

SEQ ID NO: 16377 - protein, 5 aa, Homo sapiens
KFSNS

SEQ ID NO: 16378 - protein, 5 aa, Homo sapiens
VTSDD

SEQ ID NO: 16379 - protein, 5 aa, Homo sapiens
VIFPQ

SEQ ID NO: 16380 - protein, 5 aa, Homo sapiens
PILGM

SEQ ID NO: 16381 - protein, 5 aa, Homo sapiens
KKALD

SEQ ID NO: 16382 - protein, 5 aa, Homo sapiens
VIFPQ

SEQ ID NO: 16383 - protein, 5 aa, Homo sapiens
TLTPC

SEQ ID NO: 16384 - protein, 5 aa, Homo sapiens
DCGQF

SEQ ID NO: 16385 - protein, 5 aa, Homo sapiens
PQPPE

SEQ ID NO: 16386 - protein, 5 aa, Homo sapiens
PSQRA

SEQ ID NO: 16387 - protein, 5 aa, Homo sapiens
VIFPQ

SEQ ID NO: 16388 - protein, 5 aa, Homo sapiens
NLKPC

SEQ ID NO: 16389 - protein, 5 aa, Homo sapiens
KQMAP

SEQ ID NO: 16390 - protein, 5 aa, Homo sapiens
VGNEE

SEQ ID NO: 16391 - protein, 5 aa, Homo sapiens
ASSTP

SEQ ID NO: 16392 - protein, 5 aa, Homo sapiens
RQLVP

SEQ ID NO: 16393 - protein, 5 aa, Homo sapiens
RIGTI

SEQ ID NO: 16394 - protein, 5 aa, Homo sapiens
AIRSK

SEQ ID NO: 16395 - protein, 5 aa, Homo sapiens
FLRRP

SEQ ID NO: 16396 - protein, 5 aa, Homo sapiens
SVTEE

SEQ ID NO: 16397 - protein, 5 aa, Homo sapiens
PQPPE

SEQ ID NO: 16398 - protein, 5 aa, Homo sapiens
RTKKT

SEQ ID NO: 16399 - protein, 5 aa, Homo sapiens
DRWTF

SEQ ID NO: 16400 - protein, 5 aa, Homo sapiens
SESKV

SEQ ID NO: 16401 - protein, 5 aa, Homo sapiens
IISLD

SEQ ID NO: 16402 - protein, 5 aa, Homo sapiens
LRYVF

SEQ ID NO: 16403 - protein, 5 aa, Homo sapiens
TGIQV

SEQ ID NO: 16404 - protein, 5 aa, Homo sapiens
EKLEQ

SEQ ID NO: 16405 - protein, 5 aa, Homo sapiens
LRLKP

SEQ ID NO: 16406 - protein, 5 aa, Homo sapiens
HSSNC

SEQ ID NO: 16407 - protein, 5 aa, Homo sapiens
CWIIK

SEQ ID NO: 16408 - protein, 5 aa, Homo sapiens
DEAIY

SEQ ID NO: 16409 - protein, 5 aa, Homo sapiens
NNNVQ

SEQ ID NO: 16410 - protein, 5 aa, Homo sapiens
SLDVG

SEQ ID NO: 16411 - protein, 5 aa, Homo sapiens
RQGTS

SEQ ID NO: 16412 - protein, 5 aa, Homo sapiens
VKFNS

SEQ ID NO: 16413 - protein, 5 aa, Homo sapiens
QLPIC

SEQ ID NO: 16414 - protein, 5 aa, Homo sapiens
KALLL

SEQ ID NO: 16415 - protein, 5 aa, Homo sapiens
DCGQF

SEQ ID NO: 16416 - protein, 5 aa, Homo sapiens
TDPRD

SEQ ID NO: 16417 - protein, 5 aa, Homo sapiens
RGRRS

SEQ ID NO: 16418 - protein, 5 aa, Homo sapiens
GSGRR

SEQ ID NO: 16419 - protein, 5 aa, Homo sapiens
DCGQF

SEQ ID NO: 16420 - protein, 5 aa, Homo sapiens
IIQLH

SEQ ID NO: 16421 - protein, 5 aa, Homo sapiens
DNPPA

SEQ ID NO: 16422 - protein, 5 aa, Homo sapiens
PQGAT

SEQ ID NO: 16423 - protein, 5 aa, Homo sapiens
RGERA

SEQ ID NO: 16424 - protein, 5 aa, Homo sapiens
EECIR

SEQ ID NO: 16425 - protein, 5 aa, Homo sapiens
ASDHP

SEQ ID NO: 16426 - protein, 5 aa, Homo sapiens
GSGRR

SEQ ID NO: 16427 - protein, 5 aa, Homo sapiens
KSAWA

SEQ ID NO: 16428 - protein, 5 aa, Homo sapiens
KKQKK

SEQ ID NO: 16429 - protein, 5 aa, Homo sapiens
EKKNR

SEQ ID NO: 16430 - protein, 5 aa, Homo sapiens
ARRPV

SEQ ID NO: 16431 - protein, 5 aa, Homo sapiens
FQFHF

SEQ ID NO: 16432 - protein, 5 aa, Homo sapiens
TRTEQ

SEQ ID NO: 16433 - protein, 5 aa, Homo sapiens
PRVLL

SEQ ID NO: 16434 - protein, 5 aa, Homo sapiens
KSKTQ

SEQ ID NO: 16435 - protein, 5 aa, Homo sapiens
QFSRL

SEQ ID NO: 16436 - protein, 5 aa, Homo sapiens
ICAVL

SEQ ID NO: 16437 - protein, 5 aa, Homo sapiens
SVHMV

SEQ ID NO: 16438 - protein, 5 aa, Homo sapiens
PSPDL

SEQ ID NO: 16439 - protein, 5 aa, Homo sapiens
APGED

SEQ ID NO: 16440 - protein, 5 aa, Homo sapiens
SGQGV

SEQ ID NO: 16441 - protein, 5 aa, Homo sapiens
SGQGV

SEQ ID NO: 16442 - protein, 5 aa, Homo sapiens
WLPCN

SEQ ID NO: 16443 - protein, 5 aa, Homo sapiens
AKQKS

SEQ ID NO: 16444 - protein, 5 aa, Homo sapiens
WSIFS

SEQ ID NO: 16445 - protein, 5 aa, Homo sapiens
YRAMV

SEQ ID NO: 16446 - protein, 5 aa, Homo sapiens
RRCLC

SEQ ID NO: 16447 - protein, 5 aa, Homo sapiens
VLFGI

SEQ ID NO: 16448 - protein, 5 aa, Homo sapiens
HKNSW

SEQ ID NO: 16449 - protein, 5 aa, Homo sapiens
SMEMD

SEQ ID NO: 16450 - protein, 5 aa, Homo sapiens
PSRHL

SEQ ID NO: 16451 - protein, 5 aa, Homo sapiens
SPSSN

SEQ ID NO: 16452 - protein, 5 aa, Homo sapiens
KSASK

SEQ ID NO: 16453 - protein, 5 aa, Homo sapiens
TSITV

SEQ ID NO: 16454 - protein, 5 aa, Homo sapiens
PRPLT

SEQ ID NO: 16455 - protein, 5 aa, Homo sapiens
VWCQR

SEQ ID NO: 16456 - protein, 5 aa, Homo sapiens
SAEAL

SEQ ID NO: 16457 - protein, 5 aa, Homo sapiens
QIGPP

SEQ ID NO: 16458 - protein, 5 aa, Homo sapiens
TQMIK

SEQ ID NO: 16459 - protein, 5 aa, Homo sapiens
SGQGV

SEQ ID NO: 16460 - protein, 5 aa, Homo sapiens
AVRRA

SEQ ID NO: 16461 - protein, 5 aa, Homo sapiens
SRDVI

SEQ ID NO: 16462 - protein, 5 aa, Homo sapiens
EKLFV

SEQ ID NO: 16463 - protein, 5 aa, Homo sapiens
PGTWK

SEQ ID NO: 16464 - protein, 5 aa, Homo sapiens
LVFSE

SEQ ID NO: 16465 - protein, 5 aa, Homo sapiens
VPQHA

SEQ ID NO: 16466 - protein, 5 aa, Homo sapiens
SQAIK

SEQ ID NO: 16467 - protein, 5 aa, Homo sapiens
VDPVH

SEQ ID NO: 16468 - protein, 5 aa, Homo sapiens
AGVID

SEQ ID NO: 16469 - protein, 5 aa, Homo sapiens
VSWVY

SEQ ID NO: 16470 - protein, 5 aa, Homo sapiens
PCVVM

SEQ ID NO: 16471 - protein, 5 aa, Homo sapiens
PVCRM

SEQ ID NO: 16472 - protein, 5 aa, Homo sapiens
LKSTE

SEQ ID NO: 16473 - protein, 5 aa, Homo sapiens
FLQKK

SEQ ID NO: 16474 - protein, 5 aa, Homo sapiens
IRQDF

SEQ ID NO: 16475 - protein, 5 aa, Homo sapiens
GNPRL

SEQ ID NO: 16476 - protein, 5 aa, Homo sapiens
ELVSE

SEQ ID NO: 16477 - protein, 5 aa, Homo sapiens
RVIGV

SEQ ID NO: 16478 - protein, 5 aa, Homo sapiens
QYSYL

SEQ ID NO: 16479 - protein, 5 aa, Homo sapiens
DVDET

SEQ ID NO: 16480 - protein, 5 aa, Homo sapiens
YHKPC

SEQ ID NO: 16481 - protein, 5 aa, Homo sapiens
ASLQG

SEQ ID NO: 16482 - protein, 5 aa, Homo sapiens
RQSKV

SEQ ID NO: 16483 - protein, 5 aa, Homo sapiens
ENLES

SEQ ID NO: 16484 - protein, 5 aa, Homo sapiens
YYHKS

SEQ ID NO: 16485 - protein, 5 aa, Homo sapiens
TATSC

SEQ ID NO: 16486 - protein, 5 aa, Homo sapiens
EKKDN

SEQ ID NO: 16487 - protein, 5 aa, Homo sapiens
HLMPQ

SEQ ID NO: 16488 - protein, 5 aa, Homo sapiens
SLEQR

SEQ ID NO: 16489 - protein, 5 aa, Homo sapiens
GKSLG

SEQ ID NO: 16490 - protein, 5 aa, Homo sapiens
MECIE

SEQ ID NO: 16491 - protein, 5 aa, Homo sapiens
GQQWK

SEQ ID NO: 16492 - protein, 5 aa, Homo sapiens
EESPV

SEQ ID NO: 16493 - protein, 5 aa, Homo sapiens
QERLD

SEQ ID NO: 16494 - protein, 5 aa, Homo sapiens
TTPAS

SEQ ID NO: 16495 - protein, 5 aa, Homo sapiens
RSTAS

SEQ ID NO: 16496 - protein, 5 aa, Homo sapiens
QRHRR

SEQ ID NO: 16497 - protein, 5 aa, Homo sapiens
CPASP

SEQ ID NO: 16498 - protein, 5 aa, Homo sapiens
SAHMV

SEQ ID NO: 16499 - protein, 5 aa, Homo sapiens
ISKQH

SEQ ID NO: 16500 - protein, 5 aa, Homo sapiens
HSFTA

SEQ ID NO: 16501 - protein, 5 aa, Homo sapiens
VSSDS

SEQ ID NO: 16502 - protein, 5 aa, Homo sapiens
WLDQT

SEQ ID NO: 16503 - protein, 5 aa, Homo sapiens
FRKTT

SEQ ID NO: 16504 - protein, 5 aa, Homo sapiens
LTCEN

SEQ ID NO: 16505 - protein, 5 aa, Homo sapiens
NCAYG

SEQ ID NO: 16506 - protein, 5 aa, Homo sapiens
NCTSV

SEQ ID NO: 16507 - protein, 5 aa, Homo sapiens
MHSNQ

SEQ ID NO: 16508 - protein, 5 aa, Homo sapiens
TKMTF

SEQ ID NO: 16509 - protein, 5 aa, Homo sapiens
TKVDQ

SEQ ID NO: 16510 - protein, 5 aa, Homo sapiens
CDYGL

SEQ ID NO: 16511 - protein, 5 aa, Homo sapiens
PTEQM

SEQ ID NO: 16512 - protein, 5 aa, Homo sapiens
AQPVM

SEQ ID NO: 16513 - protein, 5 aa, Homo sapiens
VDEEA

SEQ ID NO: 16514 - protein, 5 aa, Homo sapiens
SLYYN

SEQ ID NO: 16515 - protein, 5 aa, Homo sapiens
GEAEQ

SEQ ID NO: 16516 - protein, 5 aa, Homo sapiens
SCCSW

SEQ ID NO: 16517 - protein, 5 aa, Homo sapiens
SLGSL

SEQ ID NO: 16518 - protein, 5 aa, Homo sapiens
SNSDV

SEQ ID NO: 16519 - protein, 5 aa, Homo sapiens
HSTGS

SEQ ID NO: 16520 - protein, 5 aa, Homo sapiens
WLPCN

SEQ ID NO: 16521 - protein, 5 aa, Homo sapiens
LTQIV

SEQ ID NO: 16522 - protein, 5 aa, Homo sapiens
KMHQK

SEQ ID NO: 16523 - protein, 5 aa, Homo sapiens
SILRC

SEQ ID NO: 16524 - protein, 5 aa, Homo sapiens
IFTDV

SEQ ID NO: 16525 - protein, 5 aa, Homo sapiens
EKSRK

SEQ ID NO: 16526 - protein, 5 aa, Homo sapiens
LEKKN

SEQ ID NO: 16527 - protein, 5 aa, Homo sapiens
KNSLT

SEQ ID NO: 16528 - protein, 5 aa, Homo sapiens
TYRSS

SEQ ID NO: 16529 - protein, 5 aa, Homo sapiens
QHTDV

SEQ ID NO: 16530 - protein, 5 aa, Homo sapiens
ALTLL

SEQ ID NO: 16531 - protein, 5 aa, Homo sapiens
LFLPH

SEQ ID NO: 16532 - protein, 5 aa, Homo sapiens
LNWTT

SEQ ID NO: 16533 - protein, 5 aa, Homo sapiens
EELLQ

SEQ ID NO: 16534 - protein, 5 aa, Homo sapiens
SVLED

SEQ ID NO: 16535 - protein, 5 aa, Homo sapiens
NYYRY

SEQ ID NO: 16536 - protein, 5 aa, Homo sapiens
KIYRP

SEQ ID NO: 16537 - protein, 5 aa, Homo sapiens
LGISP

SEQ ID NO: 16538 - protein, 5 aa, Homo sapiens
RALHS

SEQ ID NO: 16539 - protein, 5 aa, Homo sapiens
TWNSK

SEQ ID NO: 16540 - protein, 5 aa, Homo sapiens
KAKGD

SEQ ID NO: 16541 - protein, 5 aa, Homo sapiens
VWGNK

SEQ ID NO: 16542 - protein, 5 aa, Homo sapiens
ASRSY

SEQ ID NO: 16543 - protein, 5 aa, Homo sapiens
VWGNK

SEQ ID NO: 16544 - protein, 5 aa, Homo sapiens
VWGNK

SEQ ID NO: 16545 - protein, 5 aa, Homo sapiens
SKAEP

SEQ ID NO: 16546 - protein, 5 aa, Homo sapiens
AYSPQ

SEQ ID NO: 16547 - protein, 5 aa, Homo sapiens
EGNPF

SEQ ID NO: 16548 - protein, 5 aa, Homo sapiens
SPGPQ

SEQ ID NO: 16549 - protein, 5 aa, Homo sapiens
EVALR

SEQ ID NO: 16550 - protein, 5 aa, Homo sapiens
PLKIT

SEQ ID NO: 16551 - protein, 5 aa, Homo sapiens
SSQKI

SEQ ID NO: 16552 - protein, 5 aa, Homo sapiens
RVVVP

SEQ ID NO: 16553 - protein, 5 aa, Homo sapiens
ECGLY

SEQ ID NO: 16554 - protein, 5 aa, Homo sapiens
TPIVV

SEQ ID NO: 16555 - protein, 5 aa, Homo sapiens
KSKAH

SEQ ID NO: 16556 - protein, 5 aa, Homo sapiens
AVEKQ

SEQ ID NO: 16557 - protein, 5 aa, Homo sapiens
NEGAI

SEQ ID NO: 16558 - protein, 5 aa, Homo sapiens
TKKSC

SEQ ID NO: 16559 - protein, 5 aa, Homo sapiens
GVRET

SEQ ID NO: 16560 - protein, 5 aa, Homo sapiens
FGKMS

SEQ ID NO: 16561 - protein, 5 aa, Homo sapiens
AEGST

SEQ ID NO: 16562 - protein, 5 aa, Homo sapiens
SSSPS

SEQ ID NO: 16563 - protein, 5 aa, Homo sapiens
LSQAG

SEQ ID NO: 16564 - protein, 5 aa, Homo sapiens
FNKGL

SEQ ID NO: 16565 - protein, 5 aa, Homo sapiens
DSPLH

SEQ ID NO: 16566 - protein, 5 aa, Homo sapiens
HRKTF

SEQ ID NO: 16567 - protein, 5 aa, Homo sapiens
PGPTR

SEQ ID NO: 16568 - protein, 5 aa, Homo sapiens
CMLLN

SEQ ID NO: 16569 - protein, 5 aa, Homo sapiens
LPWRL

SEQ ID NO: 16570 - protein, 5 aa, Homo sapiens
EVTDA

SEQ ID NO: 16571 - protein, 5 aa, Homo sapiens
SVSPA

SEQ ID NO: 16572 - protein, 5 aa, Homo sapiens
PADGP

SEQ ID NO: 16573 - protein, 5 aa, Homo sapiens
SVSPA

SEQ ID NO: 16574 - protein, 5 aa, Homo sapiens
KYRFH

SEQ ID NO: 16575 - protein, 5 aa, Homo sapiens
RKKHL

SEQ ID NO: 16576 - protein, 5 aa, Homo sapiens
PADGP

SEQ ID NO: 16577 - protein, 5 aa, Homo sapiens
FKCTS

SEQ ID NO: 16578 - protein, 5 aa, Homo sapiens
GFFST

SEQ ID NO: 16579 - protein, 5 aa, Homo sapiens
DWEGN

SEQ ID NO: 16580 - protein, 5 aa, Homo sapiens
SVSPA

SEQ ID NO: 16581 - protein, 5 aa, Homo sapiens
VNLQV

SEQ ID NO: 16582 - protein, 5 aa, Homo sapiens
TERVS

SEQ ID NO: 16583 - protein, 5 aa, Homo sapiens
ANYGS

SEQ ID NO: 16584 - protein, 5 aa, Homo sapiens
WTYNG

SEQ ID NO: 16585 - protein, 5 aa, Homo sapiens
QSLLK

SEQ ID NO: 16586 - protein, 5 aa, Homo sapiens
DEFQS

SEQ ID NO: 16587 - protein, 5 aa, Homo sapiens
GGKTR

SEQ ID NO: 16588 - protein, 5 aa, Homo sapiens
TSEVN

SEQ ID NO: 16589 - protein, 5 aa, Homo sapiens
KADGQ

SEQ ID NO: 16590 - protein, 5 aa, Homo sapiens
KSADH

SEQ ID NO: 16591 - protein, 5 aa, Homo sapiens
EVDCS

SEQ ID NO: 16592 - protein, 5 aa, Homo sapiens
NRLKY

SEQ ID NO: 16593 - protein, 5 aa, Homo sapiens
VERPV

SEQ ID NO: 16594 - protein, 5 aa, Homo sapiens
KTKSQ

SEQ ID NO: 16595 - protein, 5 aa, Homo sapiens
KFDSE

SEQ ID NO: 16596 - protein, 5 aa, Homo sapiens
LIKDE

SEQ ID NO: 16597 - protein, 5 aa, Homo sapiens
NSISD

SEQ ID NO: 16598 - protein, 5 aa, Homo sapiens
SDSAS

SEQ ID NO: 16599 - protein, 5 aa, Homo sapiens
KRNEE

SEQ ID NO: 16600 - protein, 5 aa, Homo sapiens
KDETV

SEQ ID NO: 16601 - protein, 5 aa, Homo sapiens
TPKPH

SEQ ID NO: 16602 - protein, 5 aa, Homo sapiens
EQFEF

SEQ ID NO: 16603 - protein, 5 aa, Homo sapiens
FSTIS

SEQ ID NO: 16604 - protein, 5 aa, Homo sapiens
VVIKR

SEQ ID NO: 16605 - protein, 5 aa, Homo sapiens
QRMIG

SEQ ID NO: 16606 - protein, 5 aa, Homo sapiens
QRMAG

SEQ ID NO: 16607 - protein, 5 aa, Homo sapiens
ADITI

SEQ ID NO: 16608 - protein, 5 aa, Homo sapiens
PGPLL

SEQ ID NO: 16609 - protein, 5 aa, Homo sapiens
VEEDE

SEQ ID NO: 16610 - protein, 5 aa, Homo sapiens
SPLVF

SEQ ID NO: 16611 - protein, 5 aa, Homo sapiens
FAMED

SEQ ID NO: 16612 - protein, 5 aa, Homo sapiens
AESKL

SEQ ID NO: 16613 - protein, 5 aa, Homo sapiens
PKKQE

SEQ ID NO: 16614 - protein, 5 aa, Homo sapiens
AESKL

SEQ ID NO: 16615 - protein, 5 aa, Homo sapiens
SFSRL

SEQ ID NO: 16616 - protein, 5 aa, Homo sapiens
LSHSV

SEQ ID NO: 16617 - protein, 5 aa, Homo sapiens
PWLNP

SEQ ID NO: 16618 - protein, 5 aa, Homo sapiens
SINGL

SEQ ID NO: 16619 - protein, 5 aa, Homo sapiens
QGGRP

SEQ ID NO: 16620 - protein, 5 aa, Homo sapiens
YKRKI

SEQ ID NO: 16621 - protein, 5 aa, Homo sapiens
DFQNP

SEQ ID NO: 16622 - protein, 5 aa, Homo sapiens
LLDLK

SEQ ID NO: 16623 - protein, 5 aa, Homo sapiens
MALEI

SEQ ID NO: 16624 - protein, 5 aa, Homo sapiens
PETTA

SEQ ID NO: 16625 - protein, 5 aa, Homo sapiens
DCKTQ

SEQ ID NO: 16626 - protein, 5 aa, Homo sapiens
QDTNV

SEQ ID NO: 16627 - protein, 5 aa, Homo sapiens
NPTKA

SEQ ID NO: 16628 - protein, 5 aa, Homo sapiens
AGPPS

SEQ ID NO: 16629 - protein, 5 aa, Homo sapiens
RAYKD

SEQ ID NO: 16630 - protein, 5 aa, Homo sapiens
TYISR

SEQ ID NO: 16631 - protein, 5 aa, Homo sapiens
VNPVC

SEQ ID NO: 16632 - protein, 5 aa, Homo sapiens
IDVDD

SEQ ID NO: 16633 - protein, 5 aa, Homo sapiens
ASACE

SEQ ID NO: 16634 - protein, 5 aa, Homo sapiens
SKSTI

SEQ ID NO: 16635 - protein, 5 aa, Homo sapiens
NDDYY

SEQ ID NO: 16636 - protein, 5 aa, Homo sapiens
LALVK

SEQ ID NO: 16637 - protein, 5 aa, Homo sapiens
NGKLD

SEQ ID NO: 16638 - protein, 5 aa, Homo sapiens
LGRIV

SEQ ID NO: 16639 - protein, 5 aa, Homo sapiens
QGIDY

SEQ ID NO: 16640 - protein, 5 aa, Homo sapiens
ELMEK

SEQ ID NO: 16641 - protein, 5 aa, Homo sapiens
VEFGS

SEQ ID NO: 16642 - protein, 5 aa, Homo sapiens
PCCPG

SEQ ID NO: 16643 - protein, 5 aa, Homo sapiens
TATEI

SEQ ID NO: 16644 - protein, 5 aa, Homo sapiens
PASGL

SEQ ID NO: 16645 - protein, 5 aa, Homo sapiens
KRRGS

SEQ ID NO: 16646 - protein, 5 aa, Homo sapiens
SVKAA

SEQ ID NO: 16647 - protein, 5 aa, Homo sapiens
AVTYI

SEQ ID NO: 16648 - protein, 5 aa, Homo sapiens
APKLG

SEQ ID NO: 16649 - protein, 5 aa, Homo sapiens
APMRF

SEQ ID NO: 16650 - protein, 5 aa, Homo sapiens
EECDN

SEQ ID NO: 16651 - protein, 5 aa, Homo sapiens
EECDN

SEQ ID NO: 16652 - protein, 5 aa, Homo sapiens
LAGMI

SEQ ID NO: 16653 - protein, 5 aa, Homo sapiens
KSKAK

SEQ ID NO: 16654 - protein, 5 aa, Homo sapiens
DDDDI

SEQ ID NO: 16655 - protein, 5 aa, Homo sapiens
YEKLF

SEQ ID NO: 16656 - protein, 5 aa, Homo sapiens
SYCLK

SEQ ID NO: 16657 - protein, 5 aa, Homo sapiens
LRRVK

SEQ ID NO: 16658 - protein, 5 aa, Homo sapiens
KTSLY

SEQ ID NO: 16659 - protein, 5 aa, Homo sapiens
REGEE

SEQ ID NO: 16660 - protein, 5 aa, Homo sapiens
TKGSP

SEQ ID NO: 16661 - protein, 5 aa, Homo sapiens
RKSRT

SEQ ID NO: 16662 - protein, 5 aa, Homo sapiens
ATPPY

SEQ ID NO: 16663 - protein, 5 aa, Homo sapiens
GATAS

SEQ ID NO: 16664 - protein, 5 aa, Homo sapiens
QEREL

SEQ ID NO: 16665 - protein, 5 aa, Homo sapiens
YTNDS

SEQ ID NO: 16666 - protein, 5 aa, Homo sapiens
MIRKQ

SEQ ID NO: 16667 - protein, 5 aa, Homo sapiens
VFDEF

SEQ ID NO: 16668 - protein, 5 aa, Homo sapiens
VYLPA

SEQ ID NO: 16669 - protein, 5 aa, Homo sapiens
RAAES

SEQ ID NO: 16670 - protein, 5 aa, Homo sapiens
NGLKT

SEQ ID NO: 16671 - protein, 5 aa, Homo sapiens
VCLNL

SEQ ID NO: 16672 - protein, 5 aa, Homo sapiens
YSTTV

SEQ ID NO: 16673 - protein, 5 aa, Homo sapiens
SRDRQ

SEQ ID NO: 16674 - protein, 5 aa, Homo sapiens
PKKFH

SEQ ID NO: 16675 - protein, 5 aa, Homo sapiens
SSVAY

SEQ ID NO: 16676 - protein, 5 aa, Homo sapiens
SCLPE

SEQ ID NO: 16677 - protein, 5 aa, Homo sapiens
ALLLC

SEQ ID NO: 16678 - protein, 5 aa, Homo sapiens
HKLLV

SEQ ID NO: 16679 - protein, 5 aa, Homo sapiens
CHEKP

SEQ ID NO: 16680 - protein, 5 aa, Homo sapiens
FGSRV

SEQ ID NO: 16681 - protein, 5 aa, Homo sapiens
LWMNQ

SEQ ID NO: 16682 - protein, 5 aa, Homo sapiens
THEDL

SEQ ID NO: 16683 - protein, 5 aa, Homo sapiens
PGADK

SEQ ID NO: 16684 - protein, 5 aa, Homo sapiens
NYKSG

SEQ ID NO: 16685 - protein, 5 aa, Homo sapiens
SNKPC

SEQ ID NO: 16686 - protein, 5 aa, Homo sapiens
NIGIK

SEQ ID NO: 16687 - protein, 5 aa, Homo sapiens
EGKQD

SEQ ID NO: 16688 - protein, 5 aa, Homo sapiens
QDPVA

SEQ ID NO: 16689 - protein, 5 aa, Homo sapiens
PVTRL

SEQ ID NO: 16690 - protein, 5 aa, Homo sapiens
EEEDE

SEQ ID NO: 16691 - protein, 5 aa, Homo sapiens
GPWMK

SEQ ID NO: 16692 - protein, 5 aa, Homo sapiens
SVNPN

SEQ ID NO: 16693 - protein, 5 aa, Homo sapiens
EPARI

SEQ ID NO: 16694 - protein, 5 aa, Homo sapiens
LETQH

SEQ ID NO: 16695 - protein, 5 aa, Homo sapiens
TRKKD

SEQ ID NO: 16696 - protein, 5 aa, Homo sapiens
SSLYP

SEQ ID NO: 16697 - protein, 5 aa, Homo sapiens
VHTSV

SEQ ID NO: 16698 - protein, 5 aa, Homo sapiens
SWLTE

SEQ ID NO: 16699 - protein, 5 aa, Homo sapiens
YGNDP

SEQ ID NO: 16700 - protein, 5 aa, Homo sapiens
IRDML

SEQ ID NO: 16701 - protein, 5 aa, Homo sapiens
KESTG

SEQ ID NO: 16702 - protein, 5 aa, Homo sapiens
PEESF

SEQ ID NO: 16703 - protein, 5 aa, Homo sapiens
ADQST

SEQ ID NO: 16704 - protein, 5 aa, Homo sapiens
QRGPA

SEQ ID NO: 16705 - protein, 5 aa, Homo sapiens
IEMPD

SEQ ID NO: 16706 - protein, 5 aa, Homo sapiens
FDGIF

SEQ ID NO: 16707 - protein, 5 aa, Homo sapiens
FYFSE

SEQ ID NO: 16708 - protein, 5 aa, Homo sapiens
YIYIY

SEQ ID NO: 16709 - protein, 5 aa, Homo sapiens
PEESF

SEQ ID NO: 16710 - protein, 5 aa, Homo sapiens
GVQPP

SEQ ID NO: 16711 - protein, 5 aa, Homo sapiens
VVLVQ

SEQ ID NO: 16712 - protein, 5 aa, Homo sapiens
TPHPR

SEQ ID NO: 16713 - protein, 5 aa, Homo sapiens
NSTKF

SEQ ID NO: 16714 - protein, 5 aa, Homo sapiens
QMKTE

SEQ ID NO: 16715 - protein, 5 aa, Homo sapiens
TQLWK

SEQ ID NO: 16716 - protein, 5 aa, Homo sapiens
HKLPF

SEQ ID NO: 16717 - protein, 5 aa, Homo sapiens
DAHLL

SEQ ID NO: 16718 - protein, 5 aa, Homo sapiens
LGSRI

SEQ ID NO: 16719 - protein, 5 aa, Homo sapiens
ICNIL

SEQ ID NO: 16720 - protein, 5 aa, Homo sapiens
EHGDE

SEQ ID NO: 16721 - protein, 5 aa, Homo sapiens
ACTIS

SEQ ID NO: 16722 - protein, 5 aa, Homo sapiens
RCIDF

SEQ ID NO: 16723 - protein, 5 aa, Homo sapiens
VNGVP

SEQ ID NO: 16724 - protein, 5 aa, Homo sapiens
KNILV

SEQ ID NO: 16725 - protein, 5 aa, Homo sapiens
HKLKI

SEQ ID NO: 16726 - protein, 5 aa, Homo sapiens
KRRRT

SEQ ID NO: 16727 - protein, 5 aa, Homo sapiens
VQVGP

SEQ ID NO: 16728 - protein, 5 aa, Homo sapiens
AISQL

SEQ ID NO: 16729 - protein, 5 aa, Homo sapiens
ENDQS

SEQ ID NO: 16730 - protein, 5 aa, Homo sapiens
AMNSI

SEQ ID NO: 16731 - protein, 5 aa, Homo sapiens
WRAGK

SEQ ID NO: 16732 - protein, 5 aa, Homo sapiens
EGGED

SEQ ID NO: 16733 - protein, 5 aa, Homo sapiens
KLPQL

SEQ ID NO: 16734 - protein, 5 aa, Homo sapiens
RETLY

SEQ ID NO: 16735 - protein, 5 aa, Homo sapiens
DSGED

SEQ ID NO: 16736 - protein, 5 aa, Homo sapiens
NAVSN

SEQ ID NO: 16737 - protein, 5 aa, Homo sapiens
VTKIQ

SEQ ID NO: 16738 - protein, 5 aa, Homo sapiens
NVTVQ

SEQ ID NO: 16739 - protein, 5 aa, Homo sapiens
EIPAK

SEQ ID NO: 16740 - protein, 5 aa, Homo sapiens
HLRAQ

SEQ ID NO: 16741 - protein, 5 aa, Homo sapiens
IADWC

SEQ ID NO: 16742 - protein, 5 aa, Homo sapiens
RAQWL

SEQ ID NO: 16743 - protein, 5 aa, Homo sapiens
EEDDY

SEQ ID NO: 16744 - protein, 5 aa, Homo sapiens
ERPKK

SEQ ID NO: 16745 - protein, 5 aa, Homo sapiens
IDWKI

SEQ ID NO: 16746 - protein, 5 aa, Homo sapiens
HVCTA

SEQ ID NO: 16747 - protein, 5 aa, Homo sapiens
PLTHI

SEQ ID NO: 16748 - protein, 5 aa, Homo sapiens
VTLND

SEQ ID NO: 16749 - protein, 5 aa, Homo sapiens
DQKVC

SEQ ID NO: 16750 - protein, 5 aa, Homo sapiens
YPKSN

SEQ ID NO: 16751 - protein, 5 aa, Homo sapiens
ACRYR

SEQ ID NO: 16752 - protein, 5 aa, Homo sapiens
GTKLL

SEQ ID NO: 16753 - protein, 5 aa, Homo sapiens
VTMFE

SEQ ID NO: 16754 - protein, 5 aa, Homo sapiens
SVYSA

SEQ ID NO: 16755 - protein, 5 aa, Homo sapiens
VGNEN

SEQ ID NO: 16756 - protein, 5 aa, Homo sapiens
DLKSM

SEQ ID NO: 16757 - protein, 5 aa, Homo sapiens
MALLY

SEQ ID NO: 16758 - protein, 5 aa, Homo sapiens
HDTDT

SEQ ID NO: 16759 - protein, 5 aa, Homo sapiens
CEPSC

SEQ ID NO: 16760 - protein, 5 aa, Homo sapiens
GAGAR

SEQ ID NO: 16761 - protein, 5 aa, Homo sapiens
HNEST

SEQ ID NO: 16762 - protein, 5 aa, Homo sapiens
LIPIS

SEQ ID NO: 16763 - protein, 5 aa, Homo sapiens
NKSTS

SEQ ID NO: 16764 - protein, 5 aa, Homo sapiens
GRSRY

SEQ ID NO: 16765 - protein, 5 aa, Homo sapiens
VPGFK

SEQ ID NO: 16766 - protein, 5 aa, Homo sapiens
VPPFK

SEQ ID NO: 16767 - protein, 5 aa, Homo sapiens
GYCYD

SEQ ID NO: 16768 - protein, 5 aa, Homo sapiens
DLHLV

SEQ ID NO: 16769 - protein, 5 aa, Homo sapiens
GHTFD

SEQ ID NO: 16770 - protein, 5 aa, Homo sapiens
GLLKL

SEQ ID NO: 16771 - protein, 5 aa, Homo sapiens
KLLQR

SEQ ID NO: 16772 - protein, 5 aa, Homo sapiens
FFSWW

SEQ ID NO: 16773 - protein, 5 aa, Homo sapiens
AFVSP

SEQ ID NO: 16774 - protein, 5 aa, Homo sapiens
YLQHL

SEQ ID NO: 16775 - protein, 5 aa, Homo sapiens
PNRRH

SEQ ID NO: 16776 - protein, 5 aa, Homo sapiens
VCSFL

SEQ ID NO: 16777 - protein, 5 aa, Homo sapiens
SNGWL

SEQ ID NO: 16778 - protein, 5 aa, Homo sapiens
AEDRF

SEQ ID NO: 16779 - protein, 5 aa, Homo sapiens
NCCIQ

SEQ ID NO: 16780 - protein, 5 aa, Homo sapiens
YCSSP

SEQ ID NO: 16781 - protein, 5 aa, Homo sapiens
RKFHL

SEQ ID NO: 16782 - protein, 5 aa, Homo sapiens
LEYFI

SEQ ID NO: 16783 - protein, 5 aa, Homo sapiens
LLKLE

SEQ ID NO: 16784 - protein, 5 aa, Homo sapiens
DTFRQ

SEQ ID NO: 16785 - protein, 5 aa, Homo sapiens
PPPQD

SEQ ID NO: 16786 - protein, 5 aa, Homo sapiens
YESCK

SEQ ID NO: 16787 - protein, 5 aa, Homo sapiens
AGSCL

SEQ ID NO: 16788 - protein, 5 aa, Homo sapiens
EFGEF

SEQ ID NO: 16789 - protein, 5 aa, Homo sapiens
ESRFN

SEQ ID NO: 16790 - protein, 5 aa, Homo sapiens
RHGPA

SEQ ID NO: 16791 - protein, 5 aa, Homo sapiens
SLEEM

SEQ ID NO: 16792 - protein, 5 aa, Homo sapiens
RRQGC

SEQ ID NO: 16793 - protein, 5 aa, Homo sapiens
LVTSL

SEQ ID NO: 16794 - protein, 5 aa, Homo sapiens
LKRMI

SEQ ID NO: 16795 - protein, 5 aa, Homo sapiens
LKRMI

SEQ ID NO: 16796 - protein, 5 aa, Homo sapiens
LKRMI

SEQ ID NO: 16797 - protein, 5 aa, Homo sapiens
IWNLK

SEQ ID NO: 16798 - protein, 5 aa, Homo sapiens
LKRMI

SEQ ID NO: 16799 - protein, 5 aa, Homo sapiens
LKRMI

SEQ ID NO: 16800 - protein, 5 aa, Homo sapiens
LKRMI

SEQ ID NO: 16801 - protein, 5 aa, Homo sapiens
FGCLR

SEQ ID NO: 16802 - protein, 5 aa, Homo sapiens
SQDIK

SEQ ID NO: 16803 - protein, 5 aa, Homo sapiens
AQGKK

SEQ ID NO: 16804 - protein, 5 aa, Homo sapiens
LQPCI

SEQ ID NO: 16805 - protein, 5 aa, Homo sapiens
SRSSC

SEQ ID NO: 16806 - protein, 5 aa, Homo sapiens
KSAST

SEQ ID NO: 16807 - protein, 5 aa, Homo sapiens
KRRGL

SEQ ID NO: 16808 - protein, 5 aa, Homo sapiens
HLPAS

SEQ ID NO: 16809 - protein, 5 aa, Homo sapiens
LVSPN

SEQ ID NO: 16810 - protein, 5 aa, Homo sapiens
HHHLY

SEQ ID NO: 16811 - protein, 5 aa, Homo sapiens
KSSKR

SEQ ID NO: 16812 - protein, 5 aa, Homo sapiens
LWTLK

SEQ ID NO: 16813 - protein, 5 aa, Homo sapiens
AILRT

SEQ ID NO: 16814 - protein, 5 aa, Homo sapiens
RQTFN

SEQ ID NO: 16815 - protein, 5 aa, Homo sapiens
EAKVQ

SEQ ID NO: 16816 - protein, 5 aa, Homo sapiens
LQGQR

SEQ ID NO: 16817 - protein, 5 aa, Homo sapiens
FPANR

SEQ ID NO: 16818 - protein, 5 aa, Homo sapiens
TGDFF

SEQ ID NO: 16819 - protein, 5 aa, Homo sapiens
MKFIF

SEQ ID NO: 16820 - protein, 5 aa, Homo sapiens
QREWR

SEQ ID NO: 16821 - protein, 5 aa, Homo sapiens
SCGCH

SEQ ID NO: 16822 - protein, 5 aa, Homo sapiens
TLQKE

SEQ ID NO: 16823 - protein, 5 aa, Homo sapiens
DKYKN

SEQ ID NO: 16824 - protein, 5 aa, Homo sapiens
GNYQQ

SEQ ID NO: 16825 - protein, 5 aa, Homo sapiens
NQLKF

SEQ ID NO: 16826 - protein, 5 aa, Homo sapiens
SVMAV

SEQ ID NO: 16827 - protein, 5 aa, Homo sapiens
QKQKE

SEQ ID NO: 16828 - protein, 5 aa, Homo sapiens
PLQNW

SEQ ID NO: 16829 - protein, 5 aa, Homo sapiens
FPEDY

SEQ ID NO: 16830 - protein, 5 aa, Homo sapiens
QKKAS

SEQ ID NO: 16831 - protein, 5 aa, Homo sapiens
ADESP

SEQ ID NO: 16832 - protein, 5 aa, Homo sapiens
VTTSV

SEQ ID NO: 16833 - protein, 5 aa, Homo sapiens
FEDSS

SEQ ID NO: 16834 - protein, 5 aa, Homo sapiens
EFLQT

SEQ ID NO: 16835 - protein, 5 aa, Homo sapiens
LPVPI

SEQ ID NO: 16836 - protein, 5 aa, Homo sapiens
VPVSI

SEQ ID NO: 16837 - protein, 5 aa, Homo sapiens
LKSKN

SEQ ID NO: 16838 - protein, 5 aa, Homo sapiens
SVQLS

SEQ ID NO: 16839 - protein, 5 aa, Homo sapiens
SGSHS

SEQ ID NO: 16840 - protein, 5 aa, Homo sapiens
QMLKI

SEQ ID NO: 16841 - protein, 5 aa, Homo sapiens
RFPDL

SEQ ID NO: 16842 - protein, 5 aa, Homo sapiens
MDMSD

SEQ ID NO: 16843 - protein, 5 aa, Homo sapiens
DRIPT

SEQ ID NO: 16844 - protein, 5 aa, Homo sapiens
GKAKK

SEQ ID NO: 16845 - protein, 5 aa, Homo sapiens
RREGL

SEQ ID NO: 16846 - protein, 5 aa, Homo sapiens
NIFRP

SEQ ID NO: 16847 - protein, 5 aa, Homo sapiens
DEECG

SEQ ID NO: 16848 - protein, 5 aa, Homo sapiens
RKYQN

SEQ ID NO: 16849 - protein, 5 aa, Homo sapiens
GCSLK

SEQ ID NO: 16850 - protein, 5 aa, Homo sapiens
LCSFP

SEQ ID NO: 16851 - protein, 5 aa, Homo sapiens
KCIIM

SEQ ID NO: 16852 - protein, 5 aa, Homo sapiens
TCIIL

SEQ ID NO: 16853 - protein, 5 aa, Homo sapiens
NLPER

SEQ ID NO: 16854 - protein, 5 aa, Homo sapiens
KDRRP

SEQ ID NO: 16855 - protein, 5 aa, Homo sapiens
FPALA

SEQ ID NO: 16856 - protein, 5 aa, Homo sapiens
WIHFI

SEQ ID NO: 16857 - protein, 5 aa, Homo sapiens
ILNAS

SEQ ID NO: 16858 - protein, 5 aa, Homo sapiens
RFHRP

SEQ ID NO: 16859 - protein, 5 aa, Homo sapiens
SGSLL

SEQ ID NO: 16860 - protein, 5 aa, Homo sapiens
LVPGS

SEQ ID NO: 16861 - protein, 5 aa, Homo sapiens
SNQSA

SEQ ID NO: 16862 - protein, 5 aa, Homo sapiens
LVIEI

SEQ ID NO: 16863 - protein, 5 aa, Homo sapiens
KIFRF

SEQ ID NO: 16864 - protein, 5 aa, Homo sapiens
KCSVD

SEQ ID NO: 16865 - protein, 5 aa, Homo sapiens
SWEQW

SEQ ID NO: 16866 - protein, 5 aa, Homo sapiens
RAFSN

SEQ ID NO: 16867 - protein, 5 aa, Homo sapiens
QKPLY

SEQ ID NO: 16868 - protein, 5 aa, Homo sapiens
VDAEC

SEQ ID NO: 16869 - protein, 5 aa, Homo sapiens
NTSED

SEQ ID NO: 16870 - protein, 5 aa, Homo sapiens
ISAEL

SEQ ID NO: 16871 - protein, 5 aa, Homo sapiens
PTVIT

SEQ ID NO: 16872 - protein, 5 aa, Homo sapiens
YSLIS

SEQ ID NO: 16873 - protein, 5 aa, Homo sapiens
KAILN

SEQ ID NO: 16874 - protein, 5 aa, Homo sapiens
QYELL

SEQ ID NO: 16875 - protein, 5 aa, Homo sapiens
LGWSV

SEQ ID NO: 16876 - protein, 5 aa, Homo sapiens
GSEED

SEQ ID NO: 16877 - protein, 5 aa, Homo sapiens
KWPAQ

SEQ ID NO: 16878 - protein, 5 aa, Homo sapiens
IQEQL

SEQ ID NO: 16879 - protein, 5 aa, Homo sapiens
FSAFS

SEQ ID NO: 16880 - protein, 5 aa, Homo sapiens
QRRCF

SEQ ID NO: 16881 - protein, 5 aa, Homo sapiens
NREHS

SEQ ID NO: 16882 - protein, 5 aa, Homo sapiens
AGLWS

SEQ ID NO: 16883 - protein, 5 aa, Homo sapiens
SESFE

SEQ ID NO: 16884 - protein, 5 aa, Homo sapiens
EIGRR

SEQ ID NO: 16885 - protein, 5 aa, Homo sapiens
PRGPV

SEQ ID NO: 16886 - protein, 5 aa, Homo sapiens
RMLKL

SEQ ID NO: 16887 - protein, 5 aa, Homo sapiens
CLKAP

SEQ ID NO: 16888 - protein, 5 aa, Homo sapiens
NVKID

SEQ ID NO: 16889 - protein, 5 aa, Homo sapiens
CCLQQ

SEQ ID NO: 16890 - protein, 5 aa, Homo sapiens
RSLGL

SEQ ID NO: 16891 - protein, 5 aa, Homo sapiens
GNNIP

SEQ ID NO: 16892 - protein, 5 aa, Homo sapiens
QMTAD

SEQ ID NO: 16893 - protein, 5 aa, Homo sapiens
TMTPH

SEQ ID NO: 16894 - protein, 5 aa, Homo sapiens
KQGVH

SEQ ID NO: 16895 - protein, 5 aa, Homo sapiens
HILFL

SEQ ID NO: 16896 - protein, 5 aa, Homo sapiens
RLSLE

SEQ ID NO: 16897 - protein, 5 aa, Homo sapiens
WERNA

SEQ ID NO: 16898 - protein, 5 aa, Homo sapiens
VPKTR

SEQ ID NO: 16899 - protein, 5 aa, Homo sapiens
TQLYP

SEQ ID NO: 16900 - protein, 5 aa, Homo sapiens
SWYLG

SEQ ID NO: 16901 - protein, 5 aa, Homo sapiens
ETNQL

SEQ ID NO: 16902 - protein, 5 aa, Homo sapiens
EEIKL

SEQ ID NO: 16903 - protein, 5 aa, Homo sapiens
TPATF

SEQ ID NO: 16904 - protein, 5 aa, Homo sapiens
ICLLV

SEQ ID NO: 16905 - protein, 5 aa, Homo sapiens
YLKEL

SEQ ID NO: 16906 - protein, 5 aa, Homo sapiens
AVPQV

SEQ ID NO: 16907 - protein, 5 aa, Homo sapiens
WKDMV

SEQ ID NO: 16908 - protein, 5 aa, Homo sapiens
ATTSD

SEQ ID NO: 16909 - protein, 5 aa, Homo sapiens
IMNDD

SEQ ID NO: 16910 - protein, 5 aa, Homo sapiens
MNRQG

SEQ ID NO: 16911 - protein, 5 aa, Homo sapiens
QLQTF

SEQ ID NO: 16912 - protein, 5 aa, Homo sapiens
QRNTN

SEQ ID NO: 16913 - protein, 5 aa, Homo sapiens
KEPSL

SEQ ID NO: 16914 - protein, 5 aa, Homo sapiens
KRTGS

SEQ ID NO: 16915 - protein, 5 aa, Homo sapiens
INHGS

SEQ ID NO: 16916 - protein, 5 aa, Homo sapiens
AVLSS

SEQ ID NO: 16917 - protein, 5 aa, Homo sapiens
PQAGS

SEQ ID NO: 16918 - protein, 5 aa, Homo sapiens
TLDCS

SEQ ID NO: 16919 - protein, 5 aa, Homo sapiens
PRNKK

SEQ ID NO: 16920 - protein, 5 aa, Homo sapiens
TTLAR

SEQ ID NO: 16921 - protein, 5 aa, Homo sapiens
FGGWI

SEQ ID NO: 16922 - protein, 5 aa, Homo sapiens
TVFPK

SEQ ID NO: 16923 - protein, 5 aa, Homo sapiens
PDTQG

SEQ ID NO: 16924 - protein, 5 aa, Homo sapiens
ARGGS

SEQ ID NO: 16925 - protein, 5 aa, Homo sapiens
KAARH

SEQ ID NO: 16926 - protein, 5 aa, Homo sapiens
CFIPV

SEQ ID NO: 16927 - protein, 5 aa, Homo sapiens
SDPTP

SEQ ID NO: 16928 - protein, 5 aa, Homo sapiens
RAVSF

SEQ ID NO: 16929 - protein, 5 aa, Homo sapiens
KELLG

SEQ ID NO: 16930 - protein, 5 aa, Homo sapiens
PVQTV

SEQ ID NO: 16931 - protein, 5 aa, Homo sapiens
NSKGT

SEQ ID NO: 16932 - protein, 5 aa, Homo sapiens
NSKGT

SEQ ID NO: 16933 - protein, 5 aa, Homo sapiens
NSKGT

SEQ ID NO: 16934 - protein, 5 aa, Homo sapiens
NSKGT

SEQ ID NO: 16935 - protein, 5 aa, Homo sapiens
ACGCH

SEQ ID NO: 16936 - protein, 5 aa, Homo sapiens
NSKGT

SEQ ID NO: 16937 - protein, 5 aa, Homo sapiens
NSKGT

SEQ ID NO: 16938 - protein, 5 aa, Homo sapiens
NSKGT

SEQ ID NO: 16939 - protein, 5 aa, Homo sapiens
NSKGT

SEQ ID NO: 16940 - protein, 5 aa, Homo sapiens
NSKGT

SEQ ID NO: 16941 - protein, 5 aa, Homo sapiens
NSKGT

SEQ ID NO: 16942 - protein, 5 aa, Homo sapiens
NSKGT

SEQ ID NO: 16943 - protein, 5 aa, Homo sapiens
NSKGT

SEQ ID NO: 16944 - protein, 5 aa, Homo sapiens
MKTYK

SEQ ID NO: 16945 - protein, 5 aa, Homo sapiens
YLQDT

SEQ ID NO: 16946 - protein, 5 aa, Homo sapiens
MTMSV

SEQ ID NO: 16947 - protein, 5 aa, Homo sapiens
CFIPV

SEQ ID NO: 16948 - protein, 5 aa, Homo sapiens
YNYIA

SEQ ID NO: 16949 - protein, 5 aa, Homo sapiens
EESSS

SEQ ID NO: 16950 - protein, 5 aa, Homo sapiens
EESSS

SEQ ID NO: 16951 - protein, 5 aa, Homo sapiens
QTHKK

SEQ ID NO: 16952 - protein, 5 aa, Homo sapiens
PECLF

SEQ ID NO: 16953 - protein, 5 aa, Homo sapiens
AHSEI

SEQ ID NO: 16954 - protein, 5 aa, Homo sapiens
GYQSV

SEQ ID NO: 16955 - protein, 5 aa, Homo sapiens
GVSPF

SEQ ID NO: 16956 - protein, 5 aa, Homo sapiens
KTSLH

SEQ ID NO: 16957 - protein, 5 aa, Homo sapiens
ACPGP

SEQ ID NO: 16958 - protein, 5 aa, Homo sapiens
QEVKE

SEQ ID NO: 16959 - protein, 5 aa, Homo sapiens
PAAKP

SEQ ID NO: 16960 - protein, 5 aa, Homo sapiens
TFPNV

SEQ ID NO: 16961 - protein, 5 aa, Homo sapiens
GMNLG

SEQ ID NO: 16962 - protein, 5 aa, Homo sapiens
EGGIG

SEQ ID NO: 16963 - protein, 5 aa, Homo sapiens
SEPHL

SEQ ID NO: 16964 - protein, 5 aa, Homo sapiens
TCEAL

SEQ ID NO: 16965 - protein, 5 aa, Homo sapiens
TFPNV

SEQ ID NO: 16966 - protein, 5 aa, Homo sapiens
GKDDK

SEQ ID NO: 16967 - protein, 5 aa, Homo sapiens
GNLGA

SEQ ID NO: 16968 - protein, 5 aa, Homo sapiens
VDLSA

SEQ ID NO: 16969 - protein, 5 aa, Homo sapiens
EADES

SEQ ID NO: 16970 - protein, 5 aa, Homo sapiens
LTPES

SEQ ID NO: 16971 - protein, 5 aa, Homo sapiens
DSLLN

SEQ ID NO: 16972 - protein, 5 aa, Homo sapiens
LEFKE

SEQ ID NO: 16973 - protein, 5 aa, Homo sapiens
LFNRV

SEQ ID NO: 16974 - protein, 5 aa, Homo sapiens
LENID

SEQ ID NO: 16975 - protein, 5 aa, Homo sapiens
QEWSY

SEQ ID NO: 16976 - protein, 5 aa, Homo sapiens
AIPIT

SEQ ID NO: 16977 - protein, 5 aa, Homo sapiens
RNFLR

SEQ ID NO: 16978 - protein, 5 aa, Homo sapiens
QEQSD

SEQ ID NO: 16979 - protein, 5 aa, Homo sapiens
TCLML

SEQ ID NO: 16980 - protein, 5 aa, Homo sapiens
AFLAC

SEQ ID NO: 16981 - protein, 5 aa, Homo sapiens
ERNLL

SEQ ID NO: 16982 - protein, 5 aa, Homo sapiens
KIKPI

SEQ ID NO: 16983 - protein, 5 aa, Homo sapiens
FDDVL

SEQ ID NO: 16984 - protein, 5 aa, Homo sapiens
LKSKF

SEQ ID NO: 16985 - protein, 5 aa, Homo sapiens
SIISG

SEQ ID NO: 16986 - protein, 5 aa, Homo sapiens
EYCSK

SEQ ID NO: 16987 - protein, 5 aa, Homo sapiens
KSIKS

SEQ ID NO: 16988 - protein, 5 aa, Homo sapiens
YLRNN

SEQ ID NO: 16989 - protein, 5 aa, Homo sapiens
LETNV

SEQ ID NO: 16990 - protein, 5 aa, Homo sapiens
ENSVG

SEQ ID NO: 16991 - protein, 5 aa, Homo sapiens
FWLQD

SEQ ID NO: 16992 - protein, 5 aa, Homo sapiens
MAHGF

SEQ ID NO: 16993 - protein, 5 aa, Homo sapiens
GNAKL

SEQ ID NO: 16994 - protein, 5 aa, Homo sapiens
TETWA

SEQ ID NO: 16995 - protein, 5 aa, Homo sapiens
KFVGK

SEQ ID NO: 16996 - protein, 5 aa, Homo sapiens
CQMPF

SEQ ID NO: 16997 - protein, 5 aa, Homo sapiens
PLTFG

SEQ ID NO: 16998 - protein, 5 aa, Homo sapiens
AAAQA

SEQ ID NO: 16999 - protein, 5 aa, Homo sapiens
RHRES

SEQ ID NO: 17000 - protein, 5 aa, Homo sapiens
SWRDC

SEQ ID NO: 17001 - protein, 5 aa, Homo sapiens
ALKDE

SEQ ID NO: 17002 - protein, 5 aa, Homo sapiens
TRDNN

SEQ ID NO: 17003 - protein, 5 aa, Homo sapiens
PRLSL

SEQ ID NO: 17004 - protein, 5 aa, Homo sapiens
LFATT

SEQ ID NO: 17005 - protein, 5 aa, Homo sapiens
EPRGL

SEQ ID NO: 17006 - protein, 5 aa, Homo sapiens
TFMLL

SEQ ID NO: 17007 - protein, 5 aa, Homo sapiens
DSTFI

SEQ ID NO: 17008 - protein, 5 aa, Homo sapiens
DNQFK

SEQ ID NO: 17009 - protein, 5 aa, Homo sapiens
KNEAN

SEQ ID NO: 17010 - protein, 5 aa, Homo sapiens
PPALP

SEQ ID NO: 17011 - protein, 5 aa, Homo sapiens
IKKYT

SEQ ID NO: 17012 - protein, 5 aa, Homo sapiens
TIITL

SEQ ID NO: 17013 - protein, 5 aa, Homo sapiens
ESSLP

SEQ ID NO: 17014 - protein, 5 aa, Homo sapiens
SQSLH

SEQ ID NO: 17015 - protein, 5 aa, Homo sapiens
AVHPR

SEQ ID NO: 17016 - protein, 5 aa, Homo sapiens
DFDET

SEQ ID NO: 17017 - protein, 5 aa, Homo sapiens
FNSNT

SEQ ID NO: 17018 - protein, 5 aa, Homo sapiens
TPRTP

SEQ ID NO: 17019 - protein, 5 aa, Homo sapiens
AEITQ

SEQ ID NO: 17020 - protein, 5 aa, Homo sapiens
LEDEL

SEQ ID NO: 17021 - protein, 5 aa, Homo sapiens
GMVDG

SEQ ID NO: 17022 - protein, 5 aa, Homo sapiens
SRNQN

SEQ ID NO: 17023 - protein, 5 aa, Homo sapiens
KQRPH

SEQ ID NO: 17024 - protein, 5 aa, Homo sapiens
SAAVD

SEQ ID NO: 17025 - protein, 5 aa, Homo sapiens
QNCSC

SEQ ID NO: 17026 - protein, 5 aa, Homo sapiens
HLPAS

SEQ ID NO: 17027 - protein, 5 aa, Homo sapiens
KKASQ

SEQ ID NO: 17028 - protein, 5 aa, Homo sapiens
NTKYS

SEQ ID NO: 17029 - protein, 5 aa, Homo sapiens
VQPAQ

SEQ ID NO: 17030 - protein, 5 aa, Homo sapiens
RIATF

SEQ ID NO: 17031 - protein, 5 aa, Homo sapiens
PEAFK

SEQ ID NO: 17032 - protein, 5 aa, Homo sapiens
QVNEY

SEQ ID NO: 17033 - protein, 5 aa, Homo sapiens
ICSVS

SEQ ID NO: 17034 - protein, 5 aa, Homo sapiens
YRLFR

SEQ ID NO: 17035 - protein, 5 aa, Homo sapiens
TKTAK

SEQ ID NO: 17036 - protein, 5 aa, Homo sapiens
DTEGS

SEQ ID NO: 17037 - protein, 5 aa, Homo sapiens
EISEA

SEQ ID NO: 17038 - protein, 5 aa, Homo sapiens
KTEPS

SEQ ID NO: 17039 - protein, 5 aa, Homo sapiens
RDQSI

SEQ ID NO: 17040 - protein, 5 aa, Homo sapiens
VWYFS

SEQ ID NO: 17041 - protein, 5 aa, Homo sapiens
DHAQF

SEQ ID NO: 17042 - protein, 5 aa, Homo sapiens
SSVSL

SEQ ID NO: 17043 - protein, 5 aa, Homo sapiens
AQFLG

SEQ ID NO: 17044 - protein, 5 aa, Homo sapiens
IQGMM

SEQ ID NO: 17045 - protein, 5 aa, Homo sapiens
TLNRT

SEQ ID NO: 17046 - protein, 5 aa, Homo sapiens
DETQL

SEQ ID NO: 17047 - protein, 5 aa, Homo sapiens
LNDTL

SEQ ID NO: 17048 - protein, 5 aa, Homo sapiens
YKRRK

SEQ ID NO: 17049 - protein, 5 aa, Homo sapiens
LNKPT

SEQ ID NO: 17050 - protein, 5 aa, Homo sapiens
PSICD

SEQ ID NO: 17051 - protein, 5 aa, Homo sapiens
LEAKE

SEQ ID NO: 17052 - protein, 5 aa, Homo sapiens
RSDEL

SEQ ID NO: 17053 - protein, 5 aa, Homo sapiens
LRLSI

SEQ ID NO: 17054 - protein, 5 aa, Homo sapiens
VRQGP

SEQ ID NO: 17055 - protein, 5 aa, Homo sapiens
LALTK

SEQ ID NO: 17056 - protein, 5 aa, Homo sapiens
LNPIF

SEQ ID NO: 17057 - protein, 5 aa, Homo sapiens
SEQLN

SEQ ID NO: 17058 - protein, 5 aa, Homo sapiens
SRQIG

SEQ ID NO: 17059 - protein, 5 aa, Homo sapiens
APEKQ

SEQ ID NO: 17060 - protein, 5 aa, Homo sapiens
KAHKS

SEQ ID NO: 17061 - protein, 5 aa, Homo sapiens
SWNGE

SEQ ID NO: 17062 - protein, 5 aa, Homo sapiens
MRKYQ

SEQ ID NO: 17063 - protein, 5 aa, Homo sapiens
KYNLQ

SEQ ID NO: 17064 - protein, 5 aa, Homo sapiens
PSTPF

SEQ ID NO: 17065 - protein, 5 aa, Homo sapiens
LQSGS

SEQ ID NO: 17066 - protein, 5 aa, Homo sapiens
EEGIQ

SEQ ID NO: 17067 - protein, 5 aa, Homo sapiens
TQESF

SEQ ID NO: 17068 - protein, 5 aa, Homo sapiens
SVPAR

SEQ ID NO: 17069 - protein, 5 aa, Homo sapiens
VCGRC

SEQ ID NO: 17070 - protein, 5 aa, Homo sapiens
QAIHR

SEQ ID NO: 17071 - protein, 5 aa, Homo sapiens
VKGIY

SEQ ID NO: 17072 - protein, 5 aa, Homo sapiens
FDKEG

SEQ ID NO: 17073 - protein, 5 aa, Homo sapiens
IQSLV

SEQ ID NO: 17074 - protein, 5 aa, Homo sapiens
LPKLF

SEQ ID NO: 17075 - protein, 5 aa, Homo sapiens
GAGPR

SEQ ID NO: 17076 - protein, 5 aa, Homo sapiens
DKDQL

SEQ ID NO: 17077 - protein, 5 aa, Homo sapiens
HRKST

SEQ ID NO: 17078 - protein, 5 aa, Homo sapiens
RSFLR

SEQ ID NO: 17079 - protein, 5 aa, Homo sapiens
SRKPE

SEQ ID NO: 17080 - protein, 5 aa, Homo sapiens
KLSEC

SEQ ID NO: 17081 - protein, 5 aa, Homo sapiens
DKDQL

SEQ ID NO: 17082 - protein, 5 aa, Homo sapiens
ETFVS

SEQ ID NO: 17083 - protein, 5 aa, Homo sapiens
LSPVW

SEQ ID NO: 17084 - protein, 5 aa, Homo sapiens
NTITT

SEQ ID NO: 17085 - protein, 5 aa, Homo sapiens
PGSGK

SEQ ID NO: 17086 - protein, 5 aa, Homo sapiens
PSEQL

SEQ ID NO: 17087 - protein, 5 aa, Homo sapiens
GKEGT

SEQ ID NO: 17088 - protein, 5 aa, Homo sapiens
LRKAL

SEQ ID NO: 17089 - protein, 5 aa, Homo sapiens
LHYFK

SEQ ID NO: 17090 - protein, 5 aa, Homo sapiens
EYLQN

SEQ ID NO: 17091 - protein, 5 aa, Homo sapiens
VALGI

SEQ ID NO: 17092 - protein, 5 aa, Homo sapiens
NQNKT

SEQ ID NO: 17093 - protein, 5 aa, Homo sapiens
IQDNL

SEQ ID NO: 17094 - protein, 5 aa, Homo sapiens
VDGDL

SEQ ID NO: 17095 - protein, 5 aa, Homo sapiens
CSDDA

SEQ ID NO: 17096 - protein, 5 aa, Homo sapiens
PPTAL

SEQ ID NO: 17097 - protein, 5 aa, Homo sapiens
QITKV

SEQ ID NO: 17098 - protein, 5 aa, Homo sapiens
DTLPN

SEQ ID NO: 17099 - protein, 5 aa, Homo sapiens
SGGLE

SEQ ID NO: 17100 - protein, 5 aa, Homo sapiens
VEYLI

SEQ ID NO: 17101 - protein, 5 aa, Homo sapiens
CKQPG

SEQ ID NO: 17102 - protein, 5 aa, Homo sapiens
HCLKP

SEQ ID NO: 17103 - protein, 5 aa, Homo sapiens
DLTGD

SEQ ID NO: 17104 - protein, 5 aa, Homo sapiens
GTPGV

SEQ ID NO: 17105 - protein, 5 aa, Homo sapiens
QRGLR

SEQ ID NO: 17106 - protein, 5 aa, Homo sapiens
GIPTK

SEQ ID NO: 17107 - protein, 5 aa, Homo sapiens
PRPSD

SEQ ID NO: 17108 - protein, 5 aa, Homo sapiens
SLEKN

SEQ ID NO: 17109 - protein, 5 aa, Homo sapiens
ISKAG

SEQ ID NO: 17110 - protein, 5 aa, Homo sapiens
KKKEW

SEQ ID NO: 17111 - protein, 5 aa, Homo sapiens
TSDEL

SEQ ID NO: 17112 - protein, 5 aa, Homo sapiens
DQKYC

SEQ ID NO: 17113 - protein, 5 aa, Homo sapiens
ATKLG

SEQ ID NO: 17114 - protein, 5 aa, Homo sapiens
ILLQL

SEQ ID NO: 17115 - protein, 5 aa, Homo sapiens
FGLLK

SEQ ID NO: 17116 - protein, 5 aa, Homo sapiens
AQNFV

SEQ ID NO: 17117 - protein, 5 aa, Homo sapiens
GVAVL

SEQ ID NO: 17118 - protein, 5 aa, Homo sapiens
RAGLV

SEQ ID NO: 17119 - protein, 5 aa, Homo sapiens
RPGQV

SEQ ID NO: 17120 - protein, 5 aa, Homo sapiens
LMFKT

SEQ ID NO: 17121 - protein, 5 aa, Homo sapiens
KVTML

SEQ ID NO: 17122 - protein, 5 aa, Homo sapiens
SPGSD

SEQ ID NO: 17123 - protein, 5 aa, Homo sapiens
CVPEH

SEQ ID NO: 17124 - protein, 5 aa, Homo sapiens
SCLRS

SEQ ID NO: 17125 - protein, 5 aa, Homo sapiens
VCSFL

SEQ ID NO: 17126 - protein, 5 aa, Homo sapiens
DKPRR

SEQ ID NO: 17127 - protein, 5 aa, Homo sapiens
AKKID

SEQ ID NO: 17128 - protein, 5 aa, Homo sapiens
QDPRM

SEQ ID NO: 17129 - protein, 5 aa, Homo sapiens
AVIRF

SEQ ID NO: 17130 - protein, 5 aa, Homo sapiens
ASPGP

SEQ ID NO: 17131 - protein, 5 aa, Homo sapiens
GKQDG

SEQ ID NO: 17132 - protein, 5 aa, Homo sapiens
TWGSS

SEQ ID NO: 17133 - protein, 5 aa, Homo sapiens
GEEKK

SEQ ID NO: 17134 - protein, 5 aa, Homo sapiens
GAERV

SEQ ID NO: 17135 - protein, 5 aa, Homo sapiens
NEYFC

SEQ ID NO: 17136 - protein, 5 aa, Homo sapiens
ILDYV

SEQ ID NO: 17137 - protein, 5 aa, Homo sapiens
TEDNS

SEQ ID NO: 17138 - protein, 5 aa, Homo sapiens
RSMVG

SEQ ID NO: 17139 - protein, 5 aa, Homo sapiens
NKAYF

SEQ ID NO: 17140 - protein, 5 aa, Homo sapiens
WKLYH

SEQ ID NO: 17141 - protein, 5 aa, Homo sapiens
ALPQV

SEQ ID NO: 17142 - protein, 5 aa, Homo sapiens
KQGLL

SEQ ID NO: 17143 - protein, 5 aa, Homo sapiens
PKRGR

SEQ ID NO: 17144 - protein, 5 aa, Homo sapiens
GNRKK

SEQ ID NO: 17145 - protein, 5 aa, Homo sapiens
LRSTC

SEQ ID NO: 17146 - protein, 5 aa, Homo sapiens
SALTK

SEQ ID NO: 17147 - protein, 5 aa, Homo sapiens
DSPVF

SEQ ID NO: 17148 - protein, 5 aa, Homo sapiens
HLLFE

SEQ ID NO: 17149 - protein, 5 aa, Homo sapiens
TSQKV

SEQ ID NO: 17150 - protein, 5 aa, Homo sapiens
FLNRV

SEQ ID NO: 17151 - protein, 5 aa, Homo sapiens
GDPCP

SEQ ID NO: 17152 - protein, 5 aa, Homo sapiens
SPWEE

SEQ ID NO: 17153 - protein, 5 aa, Homo sapiens
KGFRE

SEQ ID NO: 17154 - protein, 5 aa, Homo sapiens
ASEKK

SEQ ID NO: 17155 - protein, 5 aa, Homo sapiens
GPATG

SEQ ID NO: 17156 - protein, 5 aa, Homo sapiens
SKSPF

SEQ ID NO: 17157 - protein, 5 aa, Homo sapiens
DRSPA

SEQ ID NO: 17158 - protein, 5 aa, Homo sapiens
IDQDL

SEQ ID NO: 17159 - protein, 5 aa, Homo sapiens
EALEP

SEQ ID NO: 17160 - protein, 5 aa, Homo sapiens
SSRPH

SEQ ID NO: 17161 - protein, 5 aa, Homo sapiens
RKLVF

SEQ ID NO: 17162 - protein, 5 aa, Homo sapiens
ARKGK

SEQ ID NO: 17163 - protein, 5 aa, Homo sapiens
KKRPQ

SEQ ID NO: 17164 - protein, 5 aa, Homo sapiens
LIRKH

SEQ ID NO: 17165 - protein, 5 aa, Homo sapiens
KPLTH

SEQ ID NO: 17166 - protein, 5 aa, Homo sapiens
NCVRC

SEQ ID NO: 17167 - protein, 5 aa, Homo sapiens
RRIYL

SEQ ID NO: 17168 - protein, 5 aa, Homo sapiens
PVRGR

SEQ ID NO: 17169 - protein, 5 aa, Homo sapiens
TSKPF

SEQ ID NO: 17170 - protein, 5 aa, Homo sapiens
EILSV

SEQ ID NO: 17171 - protein, 5 aa, Homo sapiens
EAQAS

SEQ ID NO: 17172 - protein, 5 aa, Homo sapiens
LGDGF

SEQ ID NO: 17173 - protein, 5 aa, Homo sapiens
LISAW

SEQ ID NO: 17174 - protein, 5 aa, Homo sapiens
PPKHR

SEQ ID NO: 17175 - protein, 5 aa, Homo sapiens
RQKQT

SEQ ID NO: 17176 - protein, 5 aa, Homo sapiens
VQERQ

SEQ ID NO: 17177 - protein, 5 aa, Homo sapiens
VVCEF

SEQ ID NO: 17178 - protein, 5 aa, Homo sapiens
PAAGP

SEQ ID NO: 17179 - protein, 5 aa, Homo sapiens
QHCSQ

SEQ ID NO: 17180 - protein, 5 aa, Homo sapiens
QDSRI

SEQ ID NO: 17181 - protein, 5 aa, Homo sapiens
TICEF

SEQ ID NO: 17182 - protein, 5 aa, Homo sapiens
IASLP

SEQ ID NO: 17183 - protein, 5 aa, Homo sapiens
TICEF

SEQ ID NO: 17184 - protein, 5 aa, Homo sapiens
PAVLY

SEQ ID NO: 17185 - protein, 5 aa, Homo sapiens
PQAPA

SEQ ID NO: 17186 - protein, 5 aa, Homo sapiens
RHCSQ

SEQ ID NO: 17187 - protein, 5 aa, Homo sapiens
TICEF

SEQ ID NO: 17188 - protein, 5 aa, Homo sapiens
TICEF

SEQ ID NO: 17189 - protein, 5 aa, Homo sapiens
QCPED

SEQ ID NO: 17190 - protein, 5 aa, Homo sapiens
CRRVQ

SEQ ID NO: 17191 - protein, 5 aa, Homo sapiens
VREDR

SEQ ID NO: 17192 - protein, 5 aa, Homo sapiens
YTADY

SEQ ID NO: 17193 - protein, 5 aa, Homo sapiens
DIVQR

SEQ ID NO: 17194 - protein, 5 aa, Homo sapiens
LEQEG

SEQ ID NO: 17195 - protein, 5 aa, Homo sapiens
KKPKE

SEQ ID NO: 17196 - protein, 5 aa, Homo sapiens
IPLVT

SEQ ID NO: 17197 - protein, 5 aa, Homo sapiens
RQTQI

SEQ ID NO: 17198 - protein, 5 aa, Homo sapiens
GGSAV

SEQ ID NO: 17199 - protein, 5 aa, Homo sapiens
CPPEL

SEQ ID NO: 17200 - protein, 5 aa, Homo sapiens
AVQMD

SEQ ID NO: 17201 - protein, 5 aa, Homo sapiens
PACPL

SEQ ID NO: 17202 - protein, 5 aa, Homo sapiens
PQLRG

SEQ ID NO: 17203 - protein, 5 aa, Homo sapiens
RAIME

SEQ ID NO: 17204 - protein, 5 aa, Homo sapiens
YDGLV

SEQ ID NO: 17205 - protein, 5 aa, Homo sapiens
WEGAV

SEQ ID NO: 17206 - protein, 5 aa, Homo sapiens
EPHPT

SEQ ID NO: 17207 - protein, 5 aa, Homo sapiens
STAAV

SEQ ID NO: 17208 - protein, 5 aa, Homo sapiens
KGFVG

SEQ ID NO: 17209 - protein, 5 aa, Homo sapiens
SHVPL

SEQ ID NO: 17210 - protein, 5 aa, Homo sapiens
AETEM

SEQ ID NO: 17211 - protein, 5 aa, Homo sapiens
EMVYR

SEQ ID NO: 17212 - protein, 5 aa, Homo sapiens
GNLLN

SEQ ID NO: 17213 - protein, 5 aa, Homo sapiens
MNRRY

SEQ ID NO: 17214 - protein, 5 aa, Homo sapiens
KVKAN

SEQ ID NO: 17215 - protein, 5 aa, Homo sapiens
VNTAF

SEQ ID NO: 17216 - protein, 5 aa, Homo sapiens
VPTVN

SEQ ID NO: 17217 - protein, 5 aa, Homo sapiens
YWQQP

SEQ ID NO: 17218 - protein, 5 aa, Homo sapiens
TAEEA

SEQ ID NO: 17219 - protein, 5 aa, Homo sapiens
QPDKR

SEQ ID NO: 17220 - protein, 5 aa, Homo sapiens
EISGS

SEQ ID NO: 17221 - protein, 5 aa, Homo sapiens
SFALR

SEQ ID NO: 17222 - protein, 5 aa, Homo sapiens
NKQPY

SEQ ID NO: 17223 - protein, 5 aa, Homo sapiens
GLLLG

SEQ ID NO: 17224 - protein, 5 aa, Homo sapiens
CREWM

SEQ ID NO: 17225 - protein, 5 aa, Homo sapiens
AIVAF

SEQ ID NO: 17226 - protein, 5 aa, Homo sapiens
EVKTN

SEQ ID NO: 17227 - protein, 5 aa, Homo sapiens
ADSQV

SEQ ID NO: 17228 - protein, 5 aa, Homo sapiens
VLYSL

SEQ ID NO: 17229 - protein, 5 aa, Homo sapiens
SGVKR

SEQ ID NO: 17230 - protein, 5 aa, Homo sapiens
KAPSF

SEQ ID NO: 17231 - protein, 5 aa, Homo sapiens
FCKYE

SEQ ID NO: 17232 - protein, 5 aa, Homo sapiens
PGSCL

SEQ ID NO: 17233 - protein, 5 aa, Homo sapiens
EQVQL

SEQ ID NO: 17234 - protein, 5 aa, Homo sapiens
QPPGE

SEQ ID NO: 17235 - protein, 5 aa, Homo sapiens
ALGYQ

SEQ ID NO: 17236 - protein, 5 aa, Homo sapiens
QGLTH

SEQ ID NO: 17237 - protein, 5 aa, Homo sapiens
SLGGP

SEQ ID NO: 17238 - protein, 5 aa, Homo sapiens
RRGME

SEQ ID NO: 17239 - protein, 5 aa, Homo sapiens
LAFKI

SEQ ID NO: 17240 - protein, 5 aa, Homo sapiens
GTKLQ

SEQ ID NO: 17241 - protein, 5 aa, Homo sapiens
QGGAE

SEQ ID NO: 17242 - protein, 5 aa, Homo sapiens
PENTS

SEQ ID NO: 17243 - protein, 5 aa, Homo sapiens
MEGVQ

SEQ ID NO: 17244 - protein, 5 aa, Homo sapiens
IGDRN

SEQ ID NO: 17245 - protein, 5 aa, Homo sapiens
DHPIT

SEQ ID NO: 17246 - protein, 5 aa, Homo sapiens
ELKLK

SEQ ID NO: 17247 - protein, 5 aa, Homo sapiens
RHMQR

SEQ ID NO: 17248 - protein, 5 aa, Homo sapiens
CTGCL

SEQ ID NO: 17249 - protein, 5 aa, Homo sapiens
KQVQN

SEQ ID NO: 17250 - protein, 5 aa, Homo sapiens
ILLMA

SEQ ID NO: 17251 - protein, 5 aa, Homo sapiens
RWRKR

SEQ ID NO: 17252 - protein, 5 aa, Homo sapiens
ACPFF

SEQ ID NO: 17253 - protein, 5 aa, Homo sapiens
SCPHS

SEQ ID NO: 17254 - protein, 5 aa, Homo sapiens
ELKTD

SEQ ID NO: 17255 - protein, 5 aa, Homo sapiens
QQQRK

SEQ ID NO: 17256 - protein, 5 aa, Homo sapiens
SINHD

SEQ ID NO: 17257 - protein, 5 aa, Homo sapiens
SVKQQ

SEQ ID NO: 17258 - protein, 5 aa, Homo sapiens
APPQT

SEQ ID NO: 17259 - protein, 5 aa, Homo sapiens
RPYPI

SEQ ID NO: 17260 - protein, 5 aa, Homo sapiens
DIPYV

SEQ ID NO: 17261 - protein, 5 aa, Homo sapiens
FCLMP

SEQ ID NO: 17262 - protein, 5 aa, Homo sapiens
GSVSC

SEQ ID NO: 17263 - protein, 5 aa, Homo sapiens
TAGSK

SEQ ID NO: 17264 - protein, 5 aa, Homo sapiens
CMSIL

SEQ ID NO: 17265 - protein, 5 aa, Homo sapiens
LQDSK

SEQ ID NO: 17266 - protein, 5 aa, Homo sapiens
YPYLM

SEQ ID NO: 17267 - protein, 5 aa, Homo sapiens
SSPAV

SEQ ID NO: 17268 - protein, 5 aa, Homo sapiens
FCLMP

SEQ ID NO: 17269 - protein, 5 aa, Homo sapiens
VTPNF

SEQ ID NO: 17270 - protein, 5 aa, Homo sapiens
QNINI

SEQ ID NO: 17271 - protein, 5 aa, Homo sapiens
DVPYV

SEQ ID NO: 17272 - protein, 5 aa, Homo sapiens
SPSCS

SEQ ID NO: 17273 - protein, 5 aa, Homo sapiens
KRLIG

SEQ ID NO: 17274 - protein, 5 aa, Homo sapiens
FCLIP

SEQ ID NO: 17275 - protein, 5 aa, Homo sapiens
EGEDD

SEQ ID NO: 17276 - protein, 5 aa, Homo sapiens
QKIHT

SEQ ID NO: 17277 - protein, 5 aa, Homo sapiens
ETGRF

SEQ ID NO: 17278 - protein, 5 aa, Homo sapiens
FRNKV

SEQ ID NO: 17279 - protein, 5 aa, Homo sapiens
KMLPS

SEQ ID NO: 17280 - protein, 5 aa, Homo sapiens
PGACS

SEQ ID NO: 17281 - protein, 5 aa, Homo sapiens
AEVAA

SEQ ID NO: 17282 - protein, 5 aa, Homo sapiens
PQMWK

SEQ ID NO: 17283 - protein, 5 aa, Homo sapiens
SRVYK

SEQ ID NO: 17284 - protein, 5 aa, Homo sapiens
FCLMP

SEQ ID NO: 17285 - protein, 5 aa, Homo sapiens
NEFYA

SEQ ID NO: 17286 - protein, 5 aa, Homo sapiens
DVEPN

SEQ ID NO: 17287 - protein, 5 aa, Homo sapiens
SIKGP

SEQ ID NO: 17288 - protein, 5 aa, Homo sapiens
TMKQH

SEQ ID NO: 17289 - protein, 5 aa, Homo sapiens
NGLAL

SEQ ID NO: 17290 - protein, 5 aa, Homo sapiens
FTSPI

SEQ ID NO: 17291 - protein, 5 aa, Homo sapiens
NPIST

SEQ ID NO: 17292 - protein, 5 aa, Homo sapiens
CVGSS

SEQ ID NO: 17293 - protein, 5 aa, Homo sapiens
GVSGE

SEQ ID NO: 17294 - protein, 5 aa, Homo sapiens
IPFLG

SEQ ID NO: 17295 - protein, 5 aa, Homo sapiens
NPLFT

SEQ ID NO: 17296 - protein, 5 aa, Homo sapiens
SILGF

SEQ ID NO: 17297 - protein, 5 aa, Homo sapiens
RCPQK

SEQ ID NO: 17298 - protein, 5 aa, Homo sapiens
RSPPA

SEQ ID NO: 17299 - protein, 5 aa, Homo sapiens
RQQNF

SEQ ID NO: 17300 - protein, 5 aa, Homo sapiens
LKRTD

SEQ ID NO: 17301 - protein, 5 aa, Homo sapiens
LASIL

SEQ ID NO: 17302 - protein, 5 aa, Homo sapiens
KQNLH

SEQ ID NO: 17303 - protein, 5 aa, Homo sapiens
QQVAP

SEQ ID NO: 17304 - protein, 5 aa, Homo sapiens
ACGCH

SEQ ID NO: 17305 - protein, 5 aa, Homo sapiens
VLTKL

SEQ ID NO: 17306 - protein, 5 aa, Homo sapiens
ESHTI

SEQ ID NO: 17307 - protein, 5 aa, Homo sapiens
KTAMA

SEQ ID NO: 17308 - protein, 5 aa, Homo sapiens
SSICF

SEQ ID NO: 17309 - protein, 5 aa, Homo sapiens
KPYLS

SEQ ID NO: 17310 - protein, 5 aa, Homo sapiens
PPDEL

SEQ ID NO: 17311 - protein, 5 aa, Homo sapiens
QSNLA

SEQ ID NO: 17312 - protein, 5 aa, Homo sapiens
PRDEL

SEQ ID NO: 17313 - protein, 5 aa, Homo sapiens
KRQHL

SEQ ID NO: 17314 - protein, 5 aa, Homo sapiens
CDMQK

SEQ ID NO: 17315 - protein, 5 aa, Homo sapiens
QVIQF

SEQ ID NO: 17316 - protein, 5 aa, Homo sapiens
CGERS

SEQ ID NO: 17317 - protein, 5 aa, Homo sapiens
EIGAF

SEQ ID NO: 17318 - protein, 5 aa, Homo sapiens
TLHGG

SEQ ID NO: 17319 - protein, 5 aa, Homo sapiens
AAATS

SEQ ID NO: 17320 - protein, 5 aa, Homo sapiens
RWKSI

SEQ ID NO: 17321 - protein, 5 aa, Homo sapiens
HTVGP

SEQ ID NO: 17322 - protein, 5 aa, Homo sapiens
AGQNL

SEQ ID NO: 17323 - protein, 5 aa, Homo sapiens
LVLNS

SEQ ID NO: 17324 - protein, 5 aa, Homo sapiens
RGAGQ

SEQ ID NO: 17325 - protein, 5 aa, Homo sapiens
KEKRG

SEQ ID NO: 17326 - protein, 5 aa, Homo sapiens
DWQHL

SEQ ID NO: 17327 - protein, 5 aa, Homo sapiens
ESLSD

SEQ ID NO: 17328 - protein, 5 aa, Homo sapiens
RFLKK

SEQ ID NO: 17329 - protein, 5 aa, Homo sapiens
RMWWV

SEQ ID NO: 17330 - protein, 5 aa, Homo sapiens
DSPSE

SEQ ID NO: 17331 - protein, 5 aa, Homo sapiens
GDAEL

SEQ ID NO: 17332 - protein, 5 aa, Homo sapiens
PPFDL

SEQ ID NO: 17333 - protein, 5 aa, Homo sapiens
KVKVS

SEQ ID NO: 17334 - protein, 5 aa, Homo sapiens
LLFTR

SEQ ID NO: 17335 - protein, 5 aa, Homo sapiens
HKAGL

SEQ ID NO: 17336 - protein, 5 aa, Homo sapiens
TRLKT

SEQ ID NO: 17337 - protein, 5 aa, Homo sapiens
IYTHT

SEQ ID NO: 17338 - protein, 5 aa, Homo sapiens
DSYKK

SEQ ID NO: 17339 - protein, 5 aa, Homo sapiens
EATET

SEQ ID NO: 17340 - protein, 5 aa, Homo sapiens
KKEKK

SEQ ID NO: 17341 - protein, 5 aa, Homo sapiens
KACGQ

SEQ ID NO: 17342 - protein, 5 aa, Homo sapiens
VLWRS

SEQ ID NO: 17343 - protein, 5 aa, Homo sapiens
AEAAG

SEQ ID NO: 17344 - protein, 5 aa, Homo sapiens
NKENF

SEQ ID NO: 17345 - protein, 5 aa, Homo sapiens
GEPRP

SEQ ID NO: 17346 - protein, 5 aa, Homo sapiens
STGAP

SEQ ID NO: 17347 - protein, 5 aa, Homo sapiens
TSCMS

SEQ ID NO: 17348 - protein, 5 aa, Homo sapiens
KPTKN

SEQ ID NO: 17349 - protein, 5 aa, Homo sapiens
VHLLT

SEQ ID NO: 17350 - protein, 5 aa, Homo sapiens
KPDTF

SEQ ID NO: 17351 - protein, 5 aa, Homo sapiens
TAIHL

SEQ ID NO: 17352 - protein, 5 aa, Homo sapiens
SDASP

SEQ ID NO: 17353 - protein, 5 aa, Homo sapiens
QCIDG

SEQ ID NO: 17354 - protein, 5 aa, Homo sapiens
PRNAI

SEQ ID NO: 17355 - protein, 5 aa, Homo sapiens
LRPGQ

SEQ ID NO: 17356 - protein, 5 aa, Homo sapiens
RDICE

SEQ ID NO: 17357 - protein, 5 aa, Homo sapiens
PQTFS

SEQ ID NO: 17358 - protein, 5 aa, Homo sapiens
PGSVQ

SEQ ID NO: 17359 - protein, 5 aa, Homo sapiens
SRRKR

SEQ ID NO: 17360 - protein, 5 aa, Homo sapiens
SQAGP

SEQ ID NO: 17361 - protein, 5 aa, Homo sapiens
RQGLL

SEQ ID NO: 17362 - protein, 5 aa, Homo sapiens
QYEIV

SEQ ID NO: 17363 - protein, 5 aa, Homo sapiens
LCNPL

SEQ ID NO: 17364 - protein, 5 aa, Homo sapiens
FATAA

SEQ ID NO: 17365 - protein, 5 aa, Homo sapiens
FQNNF

SEQ ID NO: 17366 - protein, 5 aa, Homo sapiens
MLGRV

SEQ ID NO: 17367 - protein, 5 aa, Homo sapiens
EKEEL

SEQ ID NO: 17368 - protein, 5 aa, Homo sapiens
KDIVL

SEQ ID NO: 17369 - protein, 5 aa, Homo sapiens
SSFSK

SEQ ID NO: 17370 - protein, 5 aa, Homo sapiens
FKSAD

SEQ ID NO: 17371 - protein, 5 aa, Homo sapiens
PVAGL

SEQ ID NO: 17372 - protein, 5 aa, Homo sapiens
HASYL

SEQ ID NO: 17373 - protein, 5 aa, Homo sapiens
EQWLM

SEQ ID NO: 17374 - protein, 5 aa, Homo sapiens
QGVQV

SEQ ID NO: 17375 - protein, 5 aa, Homo sapiens
IGEKD

SEQ ID NO: 17376 - protein, 5 aa, Homo sapiens
FRQKQ

SEQ ID NO: 17377 - protein, 5 aa, Homo sapiens
GVQSR

SEQ ID NO: 17378 - protein, 5 aa, Homo sapiens
DSIIQ

SEQ ID NO: 17379 - protein, 5 aa, Homo sapiens
KKYRK

SEQ ID NO: 17380 - protein, 5 aa, Homo sapiens
LLLLP

SEQ ID NO: 17381 - protein, 5 aa, Homo sapiens
QHPSE

SEQ ID NO: 17382 - protein, 5 aa, Homo sapiens
DEHTL

SEQ ID NO: 17383 - protein, 5 aa, Homo sapiens
APVFP

SEQ ID NO: 17384 - protein, 5 aa, Homo sapiens
EVYLI

SEQ ID NO: 17385 - protein, 5 aa, Homo sapiens
LFGLQ

SEQ ID NO: 17386 - protein, 5 aa, Homo sapiens
GLRDT

SEQ ID NO: 17387 - protein, 5 aa, Homo sapiens
ETLGH

SEQ ID NO: 17388 - protein, 5 aa, Homo sapiens
TFWVT

SEQ ID NO: 17389 - protein, 5 aa, Homo sapiens
LKDSQ

SEQ ID NO: 17390 - protein, 5 aa, Homo sapiens
KASRT

SEQ ID NO: 17391 - protein, 5 aa, Homo sapiens
QLYSA

SEQ ID NO: 17392 - protein, 5 aa, Homo sapiens
QTPSS

SEQ ID NO: 17393 - protein, 5 aa, Homo sapiens
RYLRK

SEQ ID NO: 17394 - protein, 5 aa, Homo sapiens
SDSQY

SEQ ID NO: 17395 - protein, 5 aa, Homo sapiens
RVLLR

SEQ ID NO: 17396 - protein, 5 aa, Homo sapiens
APDEL

SEQ ID NO: 17397 - protein, 5 aa, Homo sapiens
GDHPG

SEQ ID NO: 17398 - protein, 5 aa, Homo sapiens
SQSGP

SEQ ID NO: 17399 - protein, 5 aa, Homo sapiens
SLGHF

SEQ ID NO: 17400 - protein, 5 aa, Homo sapiens
VTEVL

SEQ ID NO: 17401 - protein, 5 aa, Homo sapiens
TEKSD

SEQ ID NO: 17402 - protein, 5 aa, Homo sapiens
PAGEE

SEQ ID NO: 17403 - protein, 5 aa, Homo sapiens
YSTRS

SEQ ID NO: 17404 - protein, 5 aa, Homo sapiens
SPYEL

SEQ ID NO: 17405 - protein, 5 aa, Homo sapiens
LKPKA

SEQ ID NO: 17406 - protein, 5 aa, Homo sapiens
VFQKS

SEQ ID NO: 17407 - protein, 5 aa, Homo sapiens
LVHLI

SEQ ID NO: 17408 - protein, 5 aa, Homo sapiens
TMYFA

SEQ ID NO: 17409 - protein, 5 aa, Homo sapiens
YLSSF

SEQ ID NO: 17410 - protein, 5 aa, Homo sapiens
SCHDL

SEQ ID NO: 17411 - protein, 5 aa, Homo sapiens
TSSMA

SEQ ID NO: 17412 - protein, 5 aa, Homo sapiens
TMYFA

SEQ ID NO: 17413 - protein, 5 aa, Homo sapiens
ASPVT

SEQ ID NO: 17414 - protein, 5 aa, Homo sapiens
TMYFA

SEQ ID NO: 17415 - protein, 5 aa, Homo sapiens
FEMDI

SEQ ID NO: 17416 - protein, 5 aa, Homo sapiens
KGLGS

SEQ ID NO: 17417 - protein, 5 aa, Homo sapiens
HHQKN

SEQ ID NO: 17418 - protein, 5 aa, Homo sapiens
NNDTN

SEQ ID NO: 17419 - protein, 5 aa, Homo sapiens
AKHRK

SEQ ID NO: 17420 - protein, 5 aa, Homo sapiens
SQYID

SEQ ID NO: 17421 - protein, 5 aa, Homo sapiens
RRIPQ

SEQ ID NO: 17422 - protein, 5 aa, Homo sapiens
PALSQ

SEQ ID NO: 17423 - protein, 5 aa, Homo sapiens
KLDAK

SEQ ID NO: 17424 - protein, 5 aa, Homo sapiens
QASCS

SEQ ID NO: 17425 - protein, 5 aa, Homo sapiens
LDTLD

SEQ ID NO: 17426 - protein, 5 aa, Homo sapiens
FERVF

SEQ ID NO: 17427 - protein, 5 aa, Homo sapiens
REEIL

SEQ ID NO: 17428 - protein, 5 aa, Homo sapiens
PTALL

SEQ ID NO: 17429 - protein, 5 aa, Homo sapiens
MGWNY

SEQ ID NO: 17430 - protein, 5 aa, Homo sapiens
IAFFL

SEQ ID NO: 17431 - protein, 5 aa, Homo sapiens
AFADP

SEQ ID NO: 17432 - protein, 5 aa, Homo sapiens
YYEAV

SEQ ID NO: 17433 - protein, 5 aa, Homo sapiens
LCYPN

SEQ ID NO: 17434 - protein, 5 aa, Homo sapiens
INHYL

SEQ ID NO: 17435 - protein, 5 aa, Homo sapiens
PLRPK

SEQ ID NO: 17436 - protein, 5 aa, Homo sapiens
KICQE

SEQ ID NO: 17437 - protein, 5 aa, Homo sapiens
LESTF

SEQ ID NO: 17438 - protein, 5 aa, Homo sapiens
APTME

SEQ ID NO: 17439 - protein, 5 aa, Homo sapiens
EICKV

SEQ ID NO: 17440 - protein, 5 aa, Homo sapiens
THVEI

SEQ ID NO: 17441 - protein, 5 aa, Homo sapiens
CVTLA

SEQ ID NO: 17442 - protein, 5 aa, Homo sapiens
VQTEF

SEQ ID NO: 17443 - protein, 5 aa, Homo sapiens
PEFFL

SEQ ID NO: 17444 - protein, 5 aa, Homo sapiens
ALSNI

SEQ ID NO: 17445 - protein, 5 aa, Homo sapiens
LTSRR

SEQ ID NO: 17446 - protein, 5 aa, Homo sapiens
EWRNQ

SEQ ID NO: 17447 - protein, 5 aa, Homo sapiens
LHAGE

SEQ ID NO: 17448 - protein, 5 aa, Homo sapiens
YPGDP

SEQ ID NO: 17449 - protein, 5 aa, Homo sapiens
GEKAM

SEQ ID NO: 17450 - protein, 5 aa, Homo sapiens
FLDPT

SEQ ID NO: 17451 - protein, 5 aa, Homo sapiens
NLTPI

SEQ ID NO: 17452 - protein, 5 aa, Homo sapiens
GCDPT

SEQ ID NO: 17453 - protein, 5 aa, Homo sapiens
MATLM

SEQ ID NO: 17454 - protein, 5 aa, Homo sapiens
VETET

SEQ ID NO: 17455 - protein, 5 aa, Homo sapiens
HFEGR

SEQ ID NO: 17456 - protein, 5 aa, Homo sapiens
NGINF

SEQ ID NO: 17457 - protein, 5 aa, Homo sapiens
VCTAV

SEQ ID NO: 17458 - protein, 5 aa, Homo sapiens
YFGTD

SEQ ID NO: 17459 - protein, 5 aa, Homo sapiens
NRQHQ

SEQ ID NO: 17460 - protein, 5 aa, Homo sapiens
IIDLK

SEQ ID NO: 17461 - protein, 5 aa, Homo sapiens
GEGCS

SEQ ID NO: 17462 - protein, 5 aa, Homo sapiens
NSRNP

SEQ ID NO: 17463 - protein, 5 aa, Homo sapiens
ETKSV

SEQ ID NO: 17464 - protein, 5 aa, Homo sapiens
LALQR

SEQ ID NO: 17465 - protein, 5 aa, Homo sapiens
IIGPA

SEQ ID NO: 17466 - protein, 5 aa, Homo sapiens
PNENT

SEQ ID NO: 17467 - protein, 5 aa, Homo sapiens
VPLPT

SEQ ID NO: 17468 - protein, 5 aa, Homo sapiens
PNTFH

SEQ ID NO: 17469 - protein, 5 aa, Homo sapiens
RISLI

SEQ ID NO: 17470 - protein, 5 aa, Homo sapiens
LFSTD

SEQ ID NO: 17471 - protein, 5 aa, Homo sapiens
PASIM

SEQ ID NO: 17472 - protein, 5 aa, Homo sapiens
LKELQ

SEQ ID NO: 17473 - protein, 5 aa, Homo sapiens
QMHRA

SEQ ID NO: 17474 - protein, 5 aa, Homo sapiens
GEARV

SEQ ID NO: 17475 - protein, 5 aa, Homo sapiens
TTEAN

SEQ ID NO: 17476 - protein, 5 aa, Homo sapiens
EACSL

SEQ ID NO: 17477 - protein, 5 aa, Homo sapiens
EPLTL

SEQ ID NO: 17478 - protein, 5 aa, Homo sapiens
SASQF

SEQ ID NO: 17479 - protein, 5 aa, Homo sapiens
SYFAS

SEQ ID NO: 17480 - protein, 5 aa, Homo sapiens
DFSYS

SEQ ID NO: 17481 - protein, 5 aa, Homo sapiens
GGNIS

SEQ ID NO: 17482 - protein, 5 aa, Homo sapiens
AKRLF

SEQ ID NO: 17483 - protein, 5 aa, Homo sapiens
SDTSN

SEQ ID NO: 17484 - protein, 5 aa, Homo sapiens
FPSKQ

SEQ ID NO: 17485 - protein, 5 aa, Homo sapiens
AMKAT

SEQ ID NO: 17486 - protein, 5 aa, Homo sapiens
EGQGS

SEQ ID NO: 17487 - protein, 5 aa, Homo sapiens
QKAKN

SEQ ID NO: 17488 - protein, 5 aa, Homo sapiens
IFRPD

SEQ ID NO: 17489 - protein, 5 aa, Homo sapiens
VIIDI

SEQ ID NO: 17490 - protein, 5 aa, Homo sapiens
PGPSK

SEQ ID NO: 17491 - protein, 5 aa, Homo sapiens
LMFAE

SEQ ID NO: 17492 - protein, 5 aa, Homo sapiens
VIVSE

SEQ ID NO: 17493 - protein, 5 aa, Homo sapiens
EDIDR

SEQ ID NO: 17494 - protein, 5 aa, Homo sapiens
EECER

SEQ ID NO: 17495 - protein, 5 aa, Homo sapiens
EATLR

SEQ ID NO: 17496 - protein, 5 aa, Homo sapiens
CSCLR

SEQ ID NO: 17497 - protein, 5 aa, Homo sapiens
EATLR

SEQ ID NO: 17498 - protein, 5 aa, Homo sapiens
RALGI

SEQ ID NO: 17499 - protein, 5 aa, Homo sapiens
GYEDE

SEQ ID NO: 17500 - protein, 5 aa, Homo sapiens
ISLLS

SEQ ID NO: 17501 - protein, 5 aa, Homo sapiens
WLAST

SEQ ID NO: 17502 - protein, 5 aa, Homo sapiens
GDLSD

SEQ ID NO: 17503 - protein, 5 aa, Homo sapiens
GVVGT

SEQ ID NO: 17504 - protein, 5 aa, Homo sapiens
AEQNE

SEQ ID NO: 17505 - protein, 5 aa, Homo sapiens
VTVVD

SEQ ID NO: 17506 - protein, 5 aa, Homo sapiens
ICAMQ

SEQ ID NO: 17507 - protein, 5 aa, Homo sapiens
TPYFL

SEQ ID NO: 17508 - protein, 5 aa, Homo sapiens
EVKLA

SEQ ID NO: 17509 - protein, 5 aa, Homo sapiens
TIDDY

SEQ ID NO: 17510 - protein, 5 aa, Homo sapiens
RIPWS

SEQ ID NO: 17511 - protein, 5 aa, Homo sapiens
YQPQP

SEQ ID NO: 17512 - protein, 5 aa, Homo sapiens
TLDDY

SEQ ID NO: 17513 - protein, 5 aa, Homo sapiens
LKHVV

SEQ ID NO: 17514 - protein, 5 aa, Homo sapiens
RDPQT

SEQ ID NO: 17515 - protein, 5 aa, Homo sapiens
GWHHH

SEQ ID NO: 17516 - protein, 5 aa, Homo sapiens
LHFVV

SEQ ID NO: 17517 - protein, 5 aa, Homo sapiens
RFTLC

SEQ ID NO: 17518 - protein, 5 aa, Homo sapiens
KRSFD

SEQ ID NO: 17519 - protein, 5 aa, Homo sapiens
FEFEA

SEQ ID NO: 17520 - protein, 5 aa, Homo sapiens
QAKQT

SEQ ID NO: 17521 - protein, 5 aa, Homo sapiens
LNWLL

SEQ ID NO: 17522 - protein, 5 aa, Homo sapiens
AGVWD

SEQ ID NO: 17523 - protein, 5 aa, Homo sapiens
PELPS

SEQ ID NO: 17524 - protein, 5 aa, Homo sapiens
WMSST

SEQ ID NO: 17525 - protein, 5 aa, Homo sapiens
EFPQN

SEQ ID NO: 17526 - protein, 5 aa, Homo sapiens
TKKKR

SEQ ID NO: 17527 - protein, 5 aa, Homo sapiens
RRCPK

SEQ ID NO: 17528 - protein, 5 aa, Homo sapiens
TSARA

SEQ ID NO: 17529 - protein, 5 aa, Homo sapiens
VSSTR

SEQ ID NO: 17530 - protein, 5 aa, Homo sapiens
LTNLF

SEQ ID NO: 17531 - protein, 5 aa, Homo sapiens
WETFE

SEQ ID NO: 17532 - protein, 5 aa, Homo sapiens
EGFQL

SEQ ID NO: 17533 - protein, 5 aa, Homo sapiens
CFALE

SEQ ID NO: 17534 - protein, 5 aa, Homo sapiens
EERLI

SEQ ID NO: 17535 - protein, 5 aa, Homo sapiens
TGDSR

SEQ ID NO: 17536 - protein, 5 aa, Homo sapiens
KQSSG

SEQ ID NO: 17537 - protein, 5 aa, Homo sapiens
NGCHI

SEQ ID NO: 17538 - protein, 5 aa, Homo sapiens
YNHWV

SEQ ID NO: 17539 - protein, 5 aa, Homo sapiens
GKETC

SEQ ID NO: 17540 - protein, 5 aa, Homo sapiens
STCVN

SEQ ID NO: 17541 - protein, 5 aa, Homo sapiens
FQTEV

SEQ ID NO: 17542 - protein, 5 aa, Homo sapiens
RQSLL

SEQ ID NO: 17543 - protein, 5 aa, Homo sapiens
ERANH

SEQ ID NO: 17544 - protein, 5 aa, Homo sapiens
FQMAT

SEQ ID NO: 17545 - protein, 5 aa, Homo sapiens
LAGIF

SEQ ID NO: 17546 - protein, 5 aa, Homo sapiens
ASPLG

SEQ ID NO: 17547 - protein, 5 aa, Homo sapiens
GQGSQ

SEQ ID NO: 17548 - protein, 5 aa, Homo sapiens
HVPDL

SEQ ID NO: 17549 - protein, 5 aa, Homo sapiens
DRIYR

SEQ ID NO: 17550 - protein, 5 aa, Homo sapiens
RMKCQ

SEQ ID NO: 17551 - protein, 5 aa, Homo sapiens
KTFFL

SEQ ID NO: 17552 - protein, 5 aa, Homo sapiens
SYSGL

SEQ ID NO: 17553 - protein, 5 aa, Homo sapiens
IVPHV

SEQ ID NO: 17554 - protein, 5 aa, Homo sapiens
AYPSG

SEQ ID NO: 17555 - protein, 5 aa, Homo sapiens
ASRML

SEQ ID NO: 17556 - protein, 5 aa, Homo sapiens
TTVLP

SEQ ID NO: 17557 - protein, 5 aa, Homo sapiens
NRDFS

SEQ ID NO: 17558 - protein, 5 aa, Homo sapiens
YEKEA

SEQ ID NO: 17559 - protein, 5 aa, Homo sapiens
SNERK

SEQ ID NO: 17560 - protein, 5 aa, Homo sapiens
VTESA

SEQ ID NO: 17561 - protein, 5 aa, Homo sapiens
LYTSG

SEQ ID NO: 17562 - protein, 5 aa, Homo sapiens
PNGII

SEQ ID NO: 17563 - protein, 5 aa, Homo sapiens
SGSCQ

SEQ ID NO: 17564 - protein, 5 aa, Homo sapiens
WKSRR

SEQ ID NO: 17565 - protein, 5 aa, Homo sapiens
ILFQY

SEQ ID NO: 17566 - protein, 5 aa, Homo sapiens
PQVYF

SEQ ID NO: 17567 - protein, 5 aa, Homo sapiens
TCRKG

SEQ ID NO: 17568 - protein, 5 aa, Homo sapiens
ENTVV

SEQ ID NO: 17569 - protein, 5 aa, Homo sapiens
YFWTK

SEQ ID NO: 17570 - protein, 5 aa, Homo sapiens
RRGLQ

SEQ ID NO: 17571 - protein, 5 aa, Homo sapiens
WLRVG

SEQ ID NO: 17572 - protein, 5 aa, Homo sapiens
KESMH

SEQ ID NO: 17573 - protein, 5 aa, Homo sapiens
PKVFP

SEQ ID NO: 17574 - protein, 5 aa, Homo sapiens
LQAQV

SEQ ID NO: 17575 - protein, 5 aa, Homo sapiens
GLIQT

SEQ ID NO: 17576 - protein, 5 aa, Homo sapiens
SHSRS

SEQ ID NO: 17577 - protein, 5 aa, Homo sapiens
MEVSC

SEQ ID NO: 17578 - protein, 5 aa, Homo sapiens
IALPT

SEQ ID NO: 17579 - protein, 5 aa, Homo sapiens
QGRGK

SEQ ID NO: 17580 - protein, 5 aa, Homo sapiens
AELAA

SEQ ID NO: 17581 - protein, 5 aa, Homo sapiens
PGHFR

SEQ ID NO: 17582 - protein, 5 aa, Homo sapiens
EAMGE

SEQ ID NO: 17583 - protein, 5 aa, Homo sapiens
IPAMM

SEQ ID NO: 17584 - protein, 5 aa, Homo sapiens
DKEQS

SEQ ID NO: 17585 - protein, 5 aa, Homo sapiens
RYHRP

SEQ ID NO: 17586 - protein, 5 aa, Homo sapiens
EGCGC

SEQ ID NO: 17587 - protein, 5 aa, Homo sapiens
PKRLM

SEQ ID NO: 17588 - protein, 5 aa, Homo sapiens
VRGMA

SEQ ID NO: 17589 - protein, 5 aa, Homo sapiens
PCLAW

SEQ ID NO: 17590 - protein, 5 aa, Homo sapiens
KKMFF

SEQ ID NO: 17591 - protein, 5 aa, Homo sapiens
ELDFL

SEQ ID NO: 17592 - protein, 5 aa, Homo sapiens
SENPQ

SEQ ID NO: 17593 - protein, 5 aa, Homo sapiens
LVEGN

SEQ ID NO: 17594 - protein, 5 aa, Homo sapiens
ISVGR

SEQ ID NO: 17595 - protein, 5 aa, Homo sapiens
SPVKG

SEQ ID NO: 17596 - protein, 5 aa, Homo sapiens
VSGRW

SEQ ID NO: 17597 - protein, 5 aa, Homo sapiens
VETST

SEQ ID NO: 17598 - protein, 5 aa, Homo sapiens
CTLVL

SEQ ID NO: 17599 - protein, 5 aa, Homo sapiens
GTTPY

SEQ ID NO: 17600 - protein, 5 aa, Homo sapiens
GAEEC

SEQ ID NO: 17601 - protein, 5 aa, Homo sapiens
AWARK

SEQ ID NO: 17602 - protein, 5 aa, Homo sapiens
STDAE

SEQ ID NO: 17603 - protein, 5 aa, Homo sapiens
PQRLY

SEQ ID NO: 17604 - protein, 5 aa, Homo sapiens
NQIIL

SEQ ID NO: 17605 - protein, 5 aa, Homo sapiens
FQKTI

SEQ ID NO: 17606 - protein, 5 aa, Homo sapiens
WKEHG

SEQ ID NO: 17607 - protein, 5 aa, Homo sapiens
HNYKA

SEQ ID NO: 17608 - protein, 5 aa, Homo sapiens
KKKET

SEQ ID NO: 17609 - protein, 5 aa, Homo sapiens
SKKKK

SEQ ID NO: 17610 - protein, 5 aa, Homo sapiens
SILDN

SEQ ID NO: 17611 - protein, 5 aa, Homo sapiens
VYKTK

SEQ ID NO: 17612 - protein, 5 aa, Homo sapiens
DVNLP

SEQ ID NO: 17613 - protein, 5 aa, Homo sapiens
SESGC

SEQ ID NO: 17614 - protein, 5 aa, Homo sapiens
QHEVL

SEQ ID NO: 17615 - protein, 5 aa, Homo sapiens
CEFPI

SEQ ID NO: 17616 - protein, 5 aa, Homo sapiens
TCQRH

SEQ ID NO: 17617 - protein, 5 aa, Homo sapiens
RELLA

SEQ ID NO: 17618 - protein, 5 aa, Homo sapiens
EATSI

SEQ ID NO: 17619 - protein, 5 aa, Homo sapiens
WDIDF

SEQ ID NO: 17620 - protein, 5 aa, Homo sapiens
EEDLD

SEQ ID NO: 17621 - protein, 5 aa, Homo sapiens
KVSPF

SEQ ID NO: 17622 - protein, 5 aa, Homo sapiens
PGDQT

SEQ ID NO: 17623 - protein, 5 aa, Homo sapiens
EVVTI

SEQ ID NO: 17624 - protein, 5 aa, Homo sapiens
PLYVF

SEQ ID NO: 17625 - protein, 5 aa, Homo sapiens
FFFFF

SEQ ID NO: 17626 - protein, 5 aa, Homo sapiens
LKQLF

SEQ ID NO: 17627 - protein, 5 aa, Homo sapiens
LCCST

SEQ ID NO: 17628 - protein, 5 aa, Homo sapiens
HHLLQ

SEQ ID NO: 17629 - protein, 5 aa, Homo sapiens
EGIAD

SEQ ID NO: 17630 - protein, 5 aa, Homo sapiens
TRPDR

SEQ ID NO: 17631 - protein, 5 aa, Homo sapiens
DDWSD

SEQ ID NO: 17632 - protein, 5 aa, Homo sapiens
PFGQS

SEQ ID NO: 17633 - protein, 5 aa, Homo sapiens
SPSDV

SEQ ID NO: 17634 - protein, 5 aa, Homo sapiens
EVVTI

SEQ ID NO: 17635 - protein, 5 aa, Homo sapiens
YQTLI

SEQ ID NO: 17636 - protein, 5 aa, Homo sapiens
FVHPI

SEQ ID NO: 17637 - protein, 5 aa, Homo sapiens
GAFLL

SEQ ID NO: 17638 - protein, 5 aa, Homo sapiens
PFLAR

SEQ ID NO: 17639 - protein, 5 aa, Homo sapiens
YRING

SEQ ID NO: 17640 - protein, 5 aa, Homo sapiens
RKHVQ

SEQ ID NO: 17641 - protein, 5 aa, Homo sapiens
PDECV

SEQ ID NO: 17642 - protein, 5 aa, Homo sapiens
LAPRT

SEQ ID NO: 17643 - protein, 5 aa, Homo sapiens
VFNLR

SEQ ID NO: 17644 - protein, 5 aa, Homo sapiens
VGWSC

SEQ ID NO: 17645 - protein, 5 aa, Homo sapiens
IFGRY

SEQ ID NO: 17646 - protein, 5 aa, Homo sapiens
KWTQH

SEQ ID NO: 17647 - protein, 5 aa, Homo sapiens
PDECV

SEQ ID NO: 17648 - protein, 5 aa, Homo sapiens
CDKFY

SEQ ID NO: 17649 - protein, 5 aa, Homo sapiens
LYKCT

SEQ ID NO: 17650 - protein, 5 aa, Homo sapiens
EEGES

SEQ ID NO: 17651 - protein, 5 aa, Homo sapiens
WCLWG

SEQ ID NO: 17652 - protein, 5 aa, Homo sapiens
EGKTF

SEQ ID NO: 17653 - protein, 5 aa, Homo sapiens
ASPQR

SEQ ID NO: 17654 - protein, 5 aa, Homo sapiens
GTQPY

SEQ ID NO: 17655 - protein, 5 aa, Homo sapiens
YYTRS

SEQ ID NO: 17656 - protein, 5 aa, Homo sapiens
PPGQG

SEQ ID NO: 17657 - protein, 5 aa, Homo sapiens
WGQGS

SEQ ID NO: 17658 - protein, 5 aa, Homo sapiens
SQASL

SEQ ID NO: 17659 - protein, 5 aa, Homo sapiens
KSNML

SEQ ID NO: 17660 - protein, 5 aa, Homo sapiens
EAMQL

SEQ ID NO: 17661 - protein, 5 aa, Homo sapiens
AEKSV

SEQ ID NO: 17662 - protein, 5 aa, Homo sapiens
VGGHP

SEQ ID NO: 17663 - protein, 5 aa, Homo sapiens
TEGIS

SEQ ID NO: 17664 - protein, 5 aa, Homo sapiens
SDHLS

SEQ ID NO: 17665 - protein, 5 aa, Homo sapiens
PSTTL

SEQ ID NO: 17666 - protein, 5 aa, Homo sapiens
EEVDN

SEQ ID NO: 17667 - protein, 5 aa, Homo sapiens
WLKEE

SEQ ID NO: 17668 - protein, 5 aa, Homo sapiens
TNHAI

SEQ ID NO: 17669 - protein, 5 aa, Homo sapiens
ISIVR

SEQ ID NO: 17670 - protein, 5 aa, Homo sapiens
EVAAF

SEQ ID NO: 17671 - protein, 5 aa, Homo sapiens
LWMAE

SEQ ID NO: 17672 - protein, 5 aa, Homo sapiens
STDIF

SEQ ID NO: 17673 - protein, 5 aa, Homo sapiens
GSLEF

SEQ ID NO: 17674 - protein, 5 aa, Homo sapiens
EGKTC

SEQ ID NO: 17675 - protein, 5 aa, Homo sapiens
TEHCH

SEQ ID NO: 17676 - protein, 5 aa, Homo sapiens
LFCFS

SEQ ID NO: 17677 - protein, 5 aa, Homo sapiens
SPSPQ

SEQ ID NO: 17678 - protein, 5 aa, Homo sapiens
LERAL

SEQ ID NO: 17679 - protein, 5 aa, Homo sapiens
DKSHE

SEQ ID NO: 17680 - protein, 5 aa, Homo sapiens
DIIEK

SEQ ID NO: 17681 - protein, 5 aa, Homo sapiens
EDHKA

SEQ ID NO: 17682 - protein, 5 aa, Homo sapiens
LLTLD

SEQ ID NO: 17683 - protein, 5 aa, Homo sapiens
FLKLA

SEQ ID NO: 17684 - protein, 5 aa, Homo sapiens
SSDTA

SEQ ID NO: 17685 - protein, 5 aa, Homo sapiens
TKQKK

SEQ ID NO: 17686 - protein, 5 aa, Homo sapiens
RPPDL

SEQ ID NO: 17687 - protein, 5 aa, Homo sapiens
FEPAP

SEQ ID NO: 17688 - protein, 5 aa, Homo sapiens
PCRRT

SEQ ID NO: 17689 - protein, 5 aa, Homo sapiens
VPWLL

SEQ ID NO: 17690 - protein, 5 aa, Homo sapiens
MDTST

SEQ ID NO: 17691 - protein, 5 aa, Homo sapiens
RESEV

SEQ ID NO: 17692 - protein, 5 aa, Homo sapiens
SSWET

SEQ ID NO: 17693 - protein, 5 aa, Homo sapiens
EEGHQ

SEQ ID NO: 17694 - protein, 5 aa, Homo sapiens
AQGPH

SEQ ID NO: 17695 - protein, 5 aa, Homo sapiens
QGPSD

SEQ ID NO: 17696 - protein, 5 aa, Homo sapiens
VGSDP

SEQ ID NO: 17697 - protein, 5 aa, Homo sapiens
EILDV

SEQ ID NO: 17698 - protein, 5 aa, Homo sapiens
SLEKP

SEQ ID NO: 17699 - protein, 5 aa, Homo sapiens
WSAVA

SEQ ID NO: 17700 - protein, 5 aa, Homo sapiens
HLSSL

SEQ ID NO: 17701 - protein, 5 aa, Homo sapiens
RLRFF

SEQ ID NO: 17702 - protein, 5 aa, Homo sapiens
STQPL

SEQ ID NO: 17703 - protein, 5 aa, Homo sapiens
PECQI

SEQ ID NO: 17704 - protein, 5 aa, Homo sapiens
DQKTK

SEQ ID NO: 17705 - protein, 5 aa, Homo sapiens
IRHQF

SEQ ID NO: 17706 - protein, 5 aa, Homo sapiens
TTDVS

SEQ ID NO: 17707 - protein, 5 aa, Homo sapiens
RSNPI

SEQ ID NO: 17708 - protein, 5 aa, Homo sapiens
GAAPE

SEQ ID NO: 17709 - protein, 5 aa, Homo sapiens
NCISR

SEQ ID NO: 17710 - protein, 5 aa, Homo sapiens
KTECL

SEQ ID NO: 17711 - protein, 5 aa, Homo sapiens
RTTEP

SEQ ID NO: 17712 - protein, 5 aa, Homo sapiens
AWGRH

SEQ ID NO: 17713 - protein, 5 aa, Homo sapiens
LERAL

SEQ ID NO: 17714 - protein, 5 aa, Homo sapiens
STDIF

SEQ ID NO: 17715 - protein, 5 aa, Homo sapiens
DLFSF

SEQ ID NO: 17716 - protein, 5 aa, Homo sapiens
LLTLD

SEQ ID NO: 17717 - protein, 5 aa, Homo sapiens
QPLKK

SEQ ID NO: 17718 - protein, 5 aa, Homo sapiens
SSLGN

SEQ ID NO: 17719 - protein, 5 aa, Homo sapiens
EDLWQ

SEQ ID NO: 17720 - protein, 5 aa, Homo sapiens
SCGCR

SEQ ID NO: 17721 - protein, 5 aa, Homo sapiens
TSAPF

SEQ ID NO: 17722 - protein, 5 aa, Homo sapiens
KRLTK

SEQ ID NO: 17723 - protein, 5 aa, Homo sapiens
NFMME

SEQ ID NO: 17724 - protein, 5 aa, Homo sapiens
NDEGL

SEQ ID NO: 17725 - protein, 5 aa, Homo sapiens
VSPQS

SEQ ID NO: 17726 - protein, 5 aa, Homo sapiens
EIIHV

SEQ ID NO: 17727 - protein, 5 aa, Homo sapiens
NSVAI

SEQ ID NO: 17728 - protein, 5 aa, Homo sapiens
FDCAL

SEQ ID NO: 17729 - protein, 5 aa, Homo sapiens
HTKKE

SEQ ID NO: 17730 - protein, 5 aa, Homo sapiens
EEEAH

SEQ ID NO: 17731 - protein, 5 aa, Homo sapiens
SRFES

SEQ ID NO: 17732 - protein, 5 aa, Homo sapiens
LVEAK

SEQ ID NO: 17733 - protein, 5 aa, Homo sapiens
KTVES

SEQ ID NO: 17734 - protein, 5 aa, Homo sapiens
LQEAV

SEQ ID NO: 17735 - protein, 5 aa, Homo sapiens
THEHL

SEQ ID NO: 17736 - protein, 5 aa, Homo sapiens
PTEGI

SEQ ID NO: 17737 - protein, 5 aa, Homo sapiens
QRLTL

SEQ ID NO: 17738 - protein, 5 aa, Homo sapiens
AMKCS

SEQ ID NO: 17739 - protein, 5 aa, Homo sapiens
IDSLT

SEQ ID NO: 17740 - protein, 5 aa, Homo sapiens
GTVSV

SEQ ID NO: 17741 - protein, 5 aa, Homo sapiens
KSSGH

SEQ ID NO: 17742 - protein, 5 aa, Homo sapiens
NWPPE

SEQ ID NO: 17743 - protein, 5 aa, Homo sapiens
LLNRA

SEQ ID NO: 17744 - protein, 5 aa, Homo sapiens
RRTGF

SEQ ID NO: 17745 - protein, 5 aa, Homo sapiens
SEAVG

SEQ ID NO: 17746 - protein, 5 aa, Homo sapiens
RFFKS

SEQ ID NO: 17747 - protein, 5 aa, Homo sapiens
DLSDC

SEQ ID NO: 17748 - protein, 5 aa, Homo sapiens
NRSYC

SEQ ID NO: 17749 - protein, 5 aa, Homo sapiens
LTGVK

SEQ ID NO: 17750 - protein, 5 aa, Homo sapiens
ATCKL

SEQ ID NO: 17751 - protein, 5 aa, Homo sapiens
FLDSS

SEQ ID NO: 17752 - protein, 5 aa, Homo sapiens
LSRDW

SEQ ID NO: 17753 - protein, 5 aa, Homo sapiens
ITVLP

SEQ ID NO: 17754 - protein, 5 aa, Homo sapiens
TQELM

SEQ ID NO: 17755 - protein, 5 aa, Homo sapiens
LLPPV

SEQ ID NO: 17756 - protein, 5 aa, Homo sapiens
GGGIF

SEQ ID NO: 17757 - protein, 5 aa, Homo sapiens
INELV

SEQ ID NO: 17758 - protein, 5 aa, Homo sapiens
EGQLQ

SEQ ID NO: 17759 - protein, 5 aa, Homo sapiens
RADRL

SEQ ID NO: 17760 - protein, 5 aa, Homo sapiens
KLFFL

SEQ ID NO: 17761 - protein, 5 aa, Homo sapiens
LYGSA

SEQ ID NO: 17762 - protein, 5 aa, Homo sapiens
QANRK

SEQ ID NO: 17763 - protein, 5 aa, Homo sapiens
EEDNE

SEQ ID NO: 17764 - protein, 5 aa, Homo sapiens
RFSRR

SEQ ID NO: 17765 - protein, 5 aa, Homo sapiens
EKPCE

SEQ ID NO: 17766 - protein, 5 aa, Homo sapiens
GMECN

SEQ ID NO: 17767 - protein, 5 aa, Homo sapiens
GIIIK

SEQ ID NO: 17768 - protein, 5 aa, Homo sapiens
GMERN

SEQ ID NO: 17769 - protein, 5 aa, Homo sapiens
GMEMN

SEQ ID NO: 17770 - protein, 5 aa, Homo sapiens
GMELK

SEQ ID NO: 17771 - protein, 5 aa, Homo sapiens
GNGLS

SEQ ID NO: 17772 - protein, 5 aa, Homo sapiens
ILPGK

SEQ ID NO: 17773 - protein, 5 aa, Homo sapiens
FRPRT

SEQ ID NO: 17774 - protein, 5 aa, Homo sapiens
EAPAS

SEQ ID NO: 17775 - protein, 5 aa, Homo sapiens
GGGAN

SEQ ID NO: 17776 - protein, 5 aa, Homo sapiens
HNCEE

SEQ ID NO: 17777 - protein, 5 aa, Homo sapiens
RSFCH

SEQ ID NO: 17778 - protein, 5 aa, Homo sapiens
GMNCL

SEQ ID NO: 17779 - protein, 5 aa, Homo sapiens
LMGTP

SEQ ID NO: 17780 - protein, 5 aa, Homo sapiens
ARALF

SEQ ID NO: 17781 - protein, 5 aa, Homo sapiens
PETKL

SEQ ID NO: 17782 - protein, 5 aa, Homo sapiens
RWKFC

SEQ ID NO: 17783 - protein, 5 aa, Homo sapiens
APGKA

SEQ ID NO: 17784 - protein, 5 aa, Homo sapiens
LDIKW

SEQ ID NO: 17785 - protein, 5 aa, Homo sapiens
GQQWK

SEQ ID NO: 17786 - protein, 5 aa, Homo sapiens
DRFVR

SEQ ID NO: 17787 - protein, 5 aa, Homo sapiens
ILNVQ

SEQ ID NO: 17788 - protein, 5 aa, Homo sapiens
CAEEN

SEQ ID NO: 17789 - protein, 5 aa, Homo sapiens
TTATS

SEQ ID NO: 17790 - protein, 5 aa, Homo sapiens
AWLQS

SEQ ID NO: 17791 - protein, 5 aa, Homo sapiens
CSCGG

SEQ ID NO: 17792 - protein, 5 aa, Homo sapiens
VSKKK

SEQ ID NO: 17793 - protein, 5 aa, Homo sapiens
VDFLF

SEQ ID NO: 17794 - protein, 5 aa, Homo sapiens
HTYGL

SEQ ID NO: 17795 - protein, 5 aa, Homo sapiens
LLFPD

SEQ ID NO: 17796 - protein, 5 aa, Homo sapiens
RNAEK

SEQ ID NO: 17797 - protein, 5 aa, Homo sapiens
TFTPQ

SEQ ID NO: 17798 - protein, 5 aa, Homo sapiens
LSLLD

SEQ ID NO: 17799 - protein, 5 aa, Homo sapiens
CGEAK

SEQ ID NO: 17800 - protein, 5 aa, Homo sapiens
TKDPK

SEQ ID NO: 17801 - protein, 5 aa, Homo sapiens
ETENS

SEQ ID NO: 17802 - protein, 5 aa, Homo sapiens
GGLFM

SEQ ID NO: 17803 - protein, 5 aa, Homo sapiens
IYSKC

SEQ ID NO: 17804 - protein, 5 aa, Homo sapiens
IAHLE

SEQ ID NO: 17805 - protein, 5 aa, Homo sapiens
PHQLA

SEQ ID NO: 17806 - protein, 5 aa, Homo sapiens
YFHTQ

SEQ ID NO: 17807 - protein, 5 aa, Homo sapiens
TKKNE

SEQ ID NO: 17808 - protein, 5 aa, Homo sapiens
PLSQV

SEQ ID NO: 17809 - protein, 5 aa, Homo sapiens
RPCPS

SEQ ID NO: 17810 - protein, 5 aa, Homo sapiens
WNVPI

SEQ ID NO: 17811 - protein, 5 aa, Homo sapiens
PAIIS

SEQ ID NO: 17812 - protein, 5 aa, Homo sapiens
NVVTQ

SEQ ID NO: 17813 - protein, 5 aa, Homo sapiens
GASSA

SEQ ID NO: 17814 - protein, 5 aa, Homo sapiens
KESYV

SEQ ID NO: 17815 - protein, 5 aa, Homo sapiens
GKSVC

SEQ ID NO: 17816 - protein, 5 aa, Homo sapiens
PATVC

SEQ ID NO: 17817 - protein, 5 aa, Homo sapiens
TVSLF

SEQ ID NO: 17818 - protein, 5 aa, Homo sapiens
TRCGG

SEQ ID NO: 17819 - protein, 5 aa, Homo sapiens
RGRLR

SEQ ID NO: 17820 - protein, 5 aa, Homo sapiens
YSYVA

SEQ ID NO: 17821 - protein, 5 aa, Homo sapiens
DKPPA

SEQ ID NO: 17822 - protein, 5 aa, Homo sapiens
PPEES

SEQ ID NO: 17823 - protein, 5 aa, Homo sapiens
FSPLK

SEQ ID NO: 17824 - protein, 5 aa, Homo sapiens
PPRAS

SEQ ID NO: 17825 - protein, 5 aa, Homo sapiens
EQVRS

SEQ ID NO: 17826 - protein, 5 aa, Homo sapiens
LSHSG

SEQ ID NO: 17827 - protein, 5 aa, Homo sapiens
VLWEE

SEQ ID NO: 17828 - protein, 5 aa, Homo sapiens
KNFNK

SEQ ID NO: 17829 - protein, 5 aa, Homo sapiens
KKPIH

SEQ ID NO: 17830 - protein, 5 aa, Homo sapiens
LLLKF

SEQ ID NO: 17831 - protein, 5 aa, Homo sapiens
RPFYS

SEQ ID NO: 17832 - protein, 5 aa, Homo sapiens
QRGSA

SEQ ID NO: 17833 - protein, 5 aa, Homo sapiens
IPMMQ

SEQ ID NO: 17834 - protein, 5 aa, Homo sapiens
LVLIV

SEQ ID NO: 17835 - protein, 5 aa, Homo sapiens
RQFNY

SEQ ID NO: 17836 - protein, 5 aa, Homo sapiens
GLQLF

SEQ ID NO: 17837 - protein, 5 aa, Homo sapiens
RIYIG

SEQ ID NO: 17838 - protein, 5 aa, Homo sapiens
LSVLF

SEQ ID NO: 17839 - protein, 5 aa, Homo sapiens
ETFGF

SEQ ID NO: 17840 - protein, 5 aa, Homo sapiens
RKQDE

SEQ ID NO: 17841 - protein, 5 aa, Homo sapiens
PCSGD

SEQ ID NO: 17842 - protein, 5 aa, Homo sapiens
QNPTE

SEQ ID NO: 17843 - protein, 5 aa, Homo sapiens
HPSLL

SEQ ID NO: 17844 - protein, 5 aa, Homo sapiens
GWHIS

SEQ ID NO: 17845 - protein, 5 aa, Homo sapiens
YSKHQ

SEQ ID NO: 17846 - protein, 5 aa, Homo sapiens
ACYTY

SEQ ID NO: 17847 - protein, 5 aa, Homo sapiens
KFYDE

SEQ ID NO: 17848 - protein, 5 aa, Homo sapiens
ITWSY

SEQ ID NO: 17849 - protein, 5 aa, Homo sapiens
PVCFV

SEQ ID NO: 17850 - protein, 5 aa, Homo sapiens
MTEVT

SEQ ID NO: 17851 - protein, 5 aa, Homo sapiens
SSRMV

SEQ ID NO: 17852 - protein, 5 aa, Homo sapiens
REANQ

SEQ ID NO: 17853 - protein, 5 aa, Homo sapiens
SSFLV

SEQ ID NO: 17854 - protein, 5 aa, Homo sapiens
KCEVW

SEQ ID NO: 17855 - protein, 5 aa, Homo sapiens
KLAQL

SEQ ID NO: 17856 - protein, 5 aa, Homo sapiens
FLYFS

SEQ ID NO: 17857 - protein, 5 aa, Homo sapiens
CPGKF

SEQ ID NO: 17858 - protein, 5 aa, Homo sapiens
LATVY

SEQ ID NO: 17859 - protein, 5 aa, Homo sapiens
LVKKS

SEQ ID NO: 17860 - protein, 5 aa, Homo sapiens
GNSET

SEQ ID NO: 17861 - protein, 5 aa, Homo sapiens
LSLTR

SEQ ID NO: 17862 - protein, 5 aa, Homo sapiens
LGSTC

SEQ ID NO: 17863 - protein, 5 aa, Homo sapiens
LPQSC

SEQ ID NO: 17864 - protein, 5 aa, Homo sapiens
LVKTS

SEQ ID NO: 17865 - protein, 5 aa, Homo sapiens
PPPEK

SEQ ID NO: 17866 - protein, 5 aa, Homo sapiens
VITLL

SEQ ID NO: 17867 - protein, 5 aa, Homo sapiens
HQGLL

SEQ ID NO: 17868 - protein, 5 aa, Homo sapiens
ILEPA

SEQ ID NO: 17869 - protein, 5 aa, Homo sapiens
GRGGD

SEQ ID NO: 17870 - protein, 5 aa, Homo sapiens
GQPSV

SEQ ID NO: 17871 - protein, 5 aa, Homo sapiens
LSLNC

SEQ ID NO: 17872 - protein, 5 aa, Homo sapiens
FIRVP

SEQ ID NO: 17873 - protein, 5 aa, Homo sapiens
ILMLV

SEQ ID NO: 17874 - protein, 5 aa, Homo sapiens
GDAQP

SEQ ID NO: 17875 - protein, 5 aa, Homo sapiens
TGLVS

SEQ ID NO: 17876 - protein, 5 aa, Homo sapiens
HVDPA

SEQ ID NO: 17877 - protein, 5 aa, Homo sapiens
LKFNN

SEQ ID NO: 17878 - protein, 5 aa, Homo sapiens
RAKAN

SEQ ID NO: 17879 - protein, 5 aa, Homo sapiens
LYHSP

SEQ ID NO: 17880 - protein, 5 aa, Homo sapiens
ENQGS

SEQ ID NO: 17881 - protein, 5 aa, Homo sapiens
WSRPS

SEQ ID NO: 17882 - protein, 5 aa, Homo sapiens
RRGPL

SEQ ID NO: 17883 - protein, 5 aa, Homo sapiens
LTHQP

SEQ ID NO: 17884 - protein, 5 aa, Homo sapiens
SLSGW

SEQ ID NO: 17885 - protein, 5 aa, Homo sapiens
EGIKM

SEQ ID NO: 17886 - protein, 5 aa, Homo sapiens
PQPPK

SEQ ID NO: 17887 - protein, 5 aa, Homo sapiens
CQGCL

SEQ ID NO: 17888 - protein, 5 aa, Homo sapiens
TDARK

SEQ ID NO: 17889 - protein, 5 aa, Homo sapiens
FFKGP

SEQ ID NO: 17890 - protein, 5 aa, Homo sapiens
IQSSD

SEQ ID NO: 17891 - protein, 5 aa, Homo sapiens
VPAHY

SEQ ID NO: 17892 - protein, 5 aa, Homo sapiens
KERML

SEQ ID NO: 17893 - protein, 5 aa, Homo sapiens
RRNIF

SEQ ID NO: 17894 - protein, 5 aa, Homo sapiens
SSRKL

SEQ ID NO: 17895 - protein, 5 aa, Homo sapiens
SRRMF

SEQ ID NO: 17896 - protein, 5 aa, Homo sapiens
LEEAD

SEQ ID NO: 17897 - protein, 5 aa, Homo sapiens
NSPCA

SEQ ID NO: 17898 - protein, 5 aa, Homo sapiens
GEGKK

SEQ ID NO: 17899 - protein, 5 aa, Homo sapiens
VTWAL

SEQ ID NO: 17900 - protein, 5 aa, Homo sapiens
LQGLG

SEQ ID NO: 17901 - protein, 5 aa, Homo sapiens
PHPYF

SEQ ID NO: 17902 - protein, 5 aa, Homo sapiens
HIRSI

SEQ ID NO: 17903 - protein, 5 aa, Homo sapiens
PTHTC

SEQ ID NO: 17904 - protein, 5 aa, Homo sapiens
KEKSD

SEQ ID NO: 17905 - protein, 5 aa, Homo sapiens
SDTSN

SEQ ID NO: 17906 - protein, 5 aa, Homo sapiens
LELPT

SEQ ID NO: 17907 - protein, 5 aa, Homo sapiens
WRAAL

SEQ ID NO: 17908 - protein, 5 aa, Homo sapiens
STGGP

SEQ ID NO: 17909 - protein, 5 aa, Homo sapiens
LQKTQ

SEQ ID NO: 17910 - protein, 5 aa, Homo sapiens
APPGV

SEQ ID NO: 17911 - protein, 5 aa, Homo sapiens
NPNYV

SEQ ID NO: 17912 - protein, 5 aa, Homo sapiens
PVSAA

SEQ ID NO: 17913 - protein, 5 aa, Homo sapiens
WLLSI

SEQ ID NO: 17914 - protein, 5 aa, Homo sapiens
HLKIH

SEQ ID NO: 17915 - protein, 5 aa, Homo sapiens
GEGWP

SEQ ID NO: 17916 - protein, 5 aa, Homo sapiens
PPAPP

SEQ ID NO: 17917 - protein, 5 aa, Homo sapiens
QTPGC

SEQ ID NO: 17918 - protein, 5 aa, Homo sapiens
NILCS

SEQ ID NO: 17919 - protein, 5 aa, Homo sapiens
STPRC

SEQ ID NO: 17920 - protein, 5 aa, Homo sapiens
MHLLL

SEQ ID NO: 17921 - protein, 5 aa, Homo sapiens
PTPPC

SEQ ID NO: 17922 - protein, 5 aa, Homo sapiens
VSLGS

SEQ ID NO: 17923 - protein, 5 aa, Homo sapiens
AALNI

SEQ ID NO: 17924 - protein, 5 aa, Homo sapiens
ISSIA

SEQ ID NO: 17925 - protein, 5 aa, Homo sapiens
FVSAM

SEQ ID NO: 17926 - protein, 5 aa, Homo sapiens
TYEKM

SEQ ID NO: 17927 - protein, 5 aa, Homo sapiens
HKRMK

SEQ ID NO: 17928 - protein, 5 aa, Homo sapiens
TRDKT

SEQ ID NO: 17929 - protein, 5 aa, Homo sapiens
EMLAF

SEQ ID NO: 17930 - protein, 5 aa, Homo sapiens
PAPSL

SEQ ID NO: 17931 - protein, 5 aa, Homo sapiens
RKQQC

SEQ ID NO: 17932 - protein, 5 aa, Homo sapiens
CALQA

SEQ ID NO: 17933 - protein, 5 aa, Homo sapiens
DRALG

SEQ ID NO: 17934 - protein, 5 aa, Homo sapiens
VRRKK

SEQ ID NO: 17935 - protein, 5 aa, Homo sapiens
PLLPS

SEQ ID NO: 17936 - protein, 5 aa, Homo sapiens
RKMFG

SEQ ID NO: 17937 - protein, 5 aa, Homo sapiens
PPGLK

SEQ ID NO: 17938 - protein, 5 aa, Homo sapiens
PGQSQ

SEQ ID NO: 17939 - protein, 5 aa, Homo sapiens
ASQEY

SEQ ID NO: 17940 - protein, 5 aa, Homo sapiens
SEDDD

SEQ ID NO: 17941 - protein, 5 aa, Homo sapiens
QGCQV

SEQ ID NO: 17942 - protein, 5 aa, Homo sapiens
CLPVN

SEQ ID NO: 17943 - protein, 5 aa, Homo sapiens
RGERA

SEQ ID NO: 17944 - protein, 5 aa, Homo sapiens
KVLCL

SEQ ID NO: 17945 - protein, 5 aa, Homo sapiens
IQASE

SEQ ID NO: 17946 - protein, 5 aa, Homo sapiens
QGLYV

SEQ ID NO: 17947 - protein, 5 aa, Homo sapiens
YLNHP

SEQ ID NO: 17948 - protein, 5 aa, Homo sapiens
NRAWR

SEQ ID NO: 17949 - protein, 5 aa, Homo sapiens
TTEWS

SEQ ID NO: 17950 - protein, 5 aa, Homo sapiens
ASQMS

SEQ ID NO: 17951 - protein, 5 aa, Homo sapiens
ALPCL

SEQ ID NO: 17952 - protein, 5 aa, Homo sapiens
GWRNF

SEQ ID NO: 17953 - protein, 5 aa, Homo sapiens
NKTRK

SEQ ID NO: 17954 - protein, 5 aa, Homo sapiens
PRPQL

SEQ ID NO: 17955 - protein, 5 aa, Homo sapiens
SPCQA

SEQ ID NO: 17956 - protein, 5 aa, Homo sapiens
NSPRC

SEQ ID NO: 17957 - protein, 5 aa, Homo sapiens
PPGFK

SEQ ID NO: 17958 - protein, 5 aa, Homo sapiens
SVIHV

SEQ ID NO: 17959 - protein, 5 aa, Homo sapiens
ERRAG

SEQ ID NO: 17960 - protein, 5 aa, Homo sapiens
KTVLR

SEQ ID NO: 17961 - protein, 5 aa, Homo sapiens
CKCKM

SEQ ID NO: 17962 - protein, 5 aa, Homo sapiens
PAGGG

SEQ ID NO: 17963 - protein, 5 aa, Homo sapiens
MNSPF

SEQ ID NO: 17964 - protein, 5 aa, Homo sapiens
FPALS

SEQ ID NO: 17965 - protein, 5 aa, Homo sapiens
LNSVP

SEQ ID NO: 17966 - protein, 5 aa, Homo sapiens
INRSC

SEQ ID NO: 17967 - protein, 5 aa, Homo sapiens
APLRQ

SEQ ID NO: 17968 - protein, 5 aa, Homo sapiens
QVKMH

SEQ ID NO: 17969 - protein, 5 aa, Homo sapiens
NTKVR

SEQ ID NO: 17970 - protein, 5 aa, Homo sapiens
NICCK

SEQ ID NO: 17971 - protein, 5 aa, Homo sapiens
QQLFD

SEQ ID NO: 17972 - protein, 5 aa, Homo sapiens
GEDGS

SEQ ID NO: 17973 - protein, 5 aa, Homo sapiens
DARDL

SEQ ID NO: 17974 - protein, 5 aa, Homo sapiens
RQRLA

SEQ ID NO: 17975 - protein, 5 aa, Homo sapiens
IKEDN

SEQ ID NO: 17976 - protein, 5 aa, Homo sapiens
QGCQV

SEQ ID NO: 17977 - protein, 5 aa, Homo sapiens
REEAE

SEQ ID NO: 17978 - protein, 5 aa, Homo sapiens
EQAGV

SEQ ID NO: 17979 - protein, 5 aa, Homo sapiens
AEMLF

SEQ ID NO: 17980 - protein, 5 aa, Homo sapiens
DCEVS

SEQ ID NO: 17981 - protein, 5 aa, Homo sapiens
KSRIW

SEQ ID NO: 17982 - protein, 5 aa, Homo sapiens
KHSAQ

SEQ ID NO: 17983 - protein, 5 aa, Homo sapiens
NTSSR

SEQ ID NO: 17984 - protein, 5 aa, Homo sapiens
RLPET

SEQ ID NO: 17985 - protein, 5 aa, Homo sapiens
NQAGS

SEQ ID NO: 17986 - protein, 5 aa, Homo sapiens
QCTEL

SEQ ID NO: 17987 - protein, 5 aa, Homo sapiens
SAVAA

SEQ ID NO: 17988 - protein, 5 aa, Homo sapiens
PQRRS

SEQ ID NO: 17989 - protein, 5 aa, Homo sapiens
PPYAP

SEQ ID NO: 17990 - protein, 5 aa, Homo sapiens
PRPPP

SEQ ID NO: 17991 - protein, 5 aa, Homo sapiens
GKKSQ

SEQ ID NO: 17992 - protein, 5 aa, Homo sapiens
IRTPK

SEQ ID NO: 17993 - protein, 5 aa, Homo sapiens
NDEDD

SEQ ID NO: 17994 - protein, 5 aa, Homo sapiens
TMRRD

SEQ ID NO: 17995 - protein, 5 aa, Homo sapiens
NSSWV

SEQ ID NO: 17996 - protein, 5 aa, Homo sapiens
MEQFT

SEQ ID NO: 17997 - protein, 5 aa, Homo sapiens
SLYTQ

SEQ ID NO: 17998 - protein, 5 aa, Homo sapiens
PQQQL

SEQ ID NO: 17999 - protein, 5 aa, Homo sapiens
KRSLF

SEQ ID NO: 18000 - protein, 5 aa, Homo sapiens
FLSPI

SEQ ID NO: 18001 - protein, 5 aa, Homo sapiens
LSAPG

SEQ ID NO: 18002 - protein, 5 aa, Homo sapiens
STEEK

SEQ ID NO: 18003 - protein, 5 aa, Homo sapiens
LVDGF

SEQ ID NO: 18004 - protein, 5 aa, Homo sapiens
LLAQG

SEQ ID NO: 18005 - protein, 5 aa, Homo sapiens
NPRTL

SEQ ID NO: 18006 - protein, 5 aa, Homo sapiens
YHYVA

SEQ ID NO: 18007 - protein, 5 aa, Homo sapiens
RGKTG

SEQ ID NO: 18008 - protein, 5 aa, Homo sapiens
DLGFL

SEQ ID NO: 18009 - protein, 5 aa, Homo sapiens
MAPQQ

SEQ ID NO: 18010 - protein, 5 aa, Homo sapiens
WNMVP

SEQ ID NO: 18011 - protein, 5 aa, Homo sapiens
GESPS

SEQ ID NO: 18012 - protein, 5 aa, Homo sapiens
WNMVP

SEQ ID NO: 18013 - protein, 5 aa, Homo sapiens
DLGGL

SEQ ID NO: 18014 - protein, 5 aa, Homo sapiens
LLWQT

SEQ ID NO: 18015 - protein, 5 aa, Homo sapiens
WNMVP

SEQ ID NO: 18016 - protein, 5 aa, Homo sapiens
AYALG

SEQ ID NO: 18017 - protein, 5 aa, Homo sapiens
HHLKT

SEQ ID NO: 18018 - protein, 5 aa, Homo sapiens
LNYIC

SEQ ID NO: 18019 - protein, 5 aa, Homo sapiens
CGMGG

SEQ ID NO: 18020 - protein, 5 aa, Homo sapiens
WHMVP

SEQ ID NO: 18021 - protein, 5 aa, Homo sapiens
WLEEN

SEQ ID NO: 18022 - protein, 5 aa, Homo sapiens
RSSRH

SEQ ID NO: 18023 - protein, 5 aa, Homo sapiens
LTVAS

SEQ ID NO: 18024 - protein, 5 aa, Homo sapiens
QLSSI

SEQ ID NO: 18025 - protein, 5 aa, Homo sapiens
KKASV

SEQ ID NO: 18026 - protein, 5 aa, Homo sapiens
GCEVS

SEQ ID NO: 18027 - protein, 5 aa, Homo sapiens
NFLPL

SEQ ID NO: 18028 - protein, 5 aa, Homo sapiens
ENDQS

SEQ ID NO: 18029 - protein, 5 aa, Homo sapiens
SSSPD

SEQ ID NO: 18030 - protein, 5 aa, Homo sapiens
YPELL

SEQ ID NO: 18031 - protein, 5 aa, Homo sapiens
NVLIR

SEQ ID NO: 18032 - protein, 5 aa, Homo sapiens
NVLIR

SEQ ID NO: 18033 - protein, 5 aa, Homo sapiens
KLEFV

SEQ ID NO: 18034 - protein, 5 aa, Homo sapiens
SCGSC

SEQ ID NO: 18035 - protein, 5 aa, Homo sapiens
GPPEK

SEQ ID NO: 18036 - protein, 5 aa, Homo sapiens
GNFGM

SEQ ID NO: 18037 - protein, 5 aa, Homo sapiens
MLWKL

SEQ ID NO: 18038 - protein, 5 aa, Homo sapiens
YENQE

SEQ ID NO: 18039 - protein, 5 aa, Homo sapiens
QQNKY

SEQ ID NO: 18040 - protein, 5 aa, Homo sapiens
GGTVA

SEQ ID NO: 18041 - protein, 5 aa, Homo sapiens
SSPLK

SEQ ID NO: 18042 - protein, 5 aa, Homo sapiens
EQPQV

SEQ ID NO: 18043 - protein, 5 aa, Homo sapiens
EQEEY

SEQ ID NO: 18044 - protein, 5 aa, Homo sapiens
EQPQV

SEQ ID NO: 18045 - protein, 5 aa, Homo sapiens
RAPFP

SEQ ID NO: 18046 - protein, 5 aa, Homo sapiens
KKRKK

SEQ ID NO: 18047 - protein, 5 aa, Homo sapiens
AEENN

SEQ ID NO: 18048 - protein, 5 aa, Homo sapiens
FKQRR

SEQ ID NO: 18049 - protein, 5 aa, Homo sapiens
VRAKR

SEQ ID NO: 18050 - protein, 5 aa, Homo sapiens
EQPQV

SEQ ID NO: 18051 - protein, 5 aa, Homo sapiens
ESAPE

SEQ ID NO: 18052 - protein, 5 aa, Homo sapiens
GGTEA

SEQ ID NO: 18053 - protein, 5 aa, Homo sapiens
ASVQC

SEQ ID NO: 18054 - protein, 5 aa, Homo sapiens
PRAHP

SEQ ID NO: 18055 - protein, 5 aa, Homo sapiens
EQPQV

SEQ ID NO: 18056 - protein, 5 aa, Homo sapiens
EIYGY

SEQ ID NO: 18057 - protein, 5 aa, Homo sapiens
PALGK

SEQ ID NO: 18058 - protein, 5 aa, Homo sapiens
YFGGT

SEQ ID NO: 18059 - protein, 5 aa, Homo sapiens
CSVFL

SEQ ID NO: 18060 - protein, 5 aa, Homo sapiens
VGMLV

SEQ ID NO: 18061 - protein, 5 aa, Homo sapiens
VYGTL

SEQ ID NO: 18062 - protein, 5 aa, Homo sapiens
YGCHA

SEQ ID NO: 18063 - protein, 5 aa, Homo sapiens
CSVFL

SEQ ID NO: 18064 - protein, 5 aa, Homo sapiens
IEEVD

SEQ ID NO: 18065 - protein, 5 aa, Homo sapiens
IEEVD

SEQ ID NO: 18066 - protein, 5 aa, Homo sapiens
IEEVD

SEQ ID NO: 18067 - protein, 5 aa, Homo sapiens
TTADF

SEQ ID NO: 18068 - protein, 5 aa, Homo sapiens
LQQKQ

SEQ ID NO: 18069 - protein, 5 aa, Homo sapiens
EVFYN

SEQ ID NO: 18070 - protein, 5 aa, Homo sapiens
FQKML

SEQ ID NO: 18071 - protein, 5 aa, Homo sapiens
SLKLP

SEQ ID NO: 18072 - protein, 5 aa, Homo sapiens
PPAPK

SEQ ID NO: 18073 - protein, 5 aa, Homo sapiens
FISLS

SEQ ID NO: 18074 - protein, 5 aa, Homo sapiens
GLASW

SEQ ID NO: 18075 - protein, 5 aa, Homo sapiens
FFWVE

SEQ ID NO: 18076 - protein, 5 aa, Homo sapiens
THKLS

SEQ ID NO: 18077 - protein, 5 aa, Homo sapiens
VQLEA

SEQ ID NO: 18078 - protein, 5 aa, Homo sapiens
WGRRG

SEQ ID NO: 18079 - protein, 5 aa, Homo sapiens
GLVPK

SEQ ID NO: 18080 - protein, 5 aa, Homo sapiens
EETED

SEQ ID NO: 18081 - protein, 5 aa, Homo sapiens
LFPGN

SEQ ID NO: 18082 - protein, 5 aa, Homo sapiens
RYKGE

SEQ ID NO: 18083 - protein, 5 aa, Homo sapiens
PPPAE

SEQ ID NO: 18084 - protein, 5 aa, Homo sapiens
ISHQN

SEQ ID NO: 18085 - protein, 5 aa, Homo sapiens
ATSIL

SEQ ID NO: 18086 - protein, 5 aa, Homo sapiens
LGPGQ

SEQ ID NO: 18087 - protein, 5 aa, Homo sapiens
YDVVN

SEQ ID NO: 18088 - protein, 5 aa, Homo sapiens
LRDEF

SEQ ID NO: 18089 - protein, 5 aa, Homo sapiens
RKISR

SEQ ID NO: 18090 - protein, 5 aa, Homo sapiens
QFCVR

SEQ ID NO: 18091 - protein, 5 aa, Homo sapiens
VIASV

SEQ ID NO: 18092 - protein, 5 aa, Homo sapiens
IVFIN

SEQ ID NO: 18093 - protein, 5 aa, Homo sapiens
KCVIM

SEQ ID NO: 18094 - protein, 5 aa, Homo sapiens
AAGCC

SEQ ID NO: 18095 - protein, 5 aa, Homo sapiens
HPLSG

SEQ ID NO: 18096 - protein, 5 aa, Homo sapiens
FFKVQ

SEQ ID NO: 18097 - protein, 5 aa, Homo sapiens
RAYNR

SEQ ID NO: 18098 - protein, 5 aa, Homo sapiens
AKALK

SEQ ID NO: 18099 - protein, 5 aa, Homo sapiens
SSAPS

SEQ ID NO: 18100 - protein, 5 aa, Homo sapiens
TRPHS

SEQ ID NO: 18101 - protein, 5 aa, Homo sapiens
LVQQF

SEQ ID NO: 18102 - protein, 5 aa, Homo sapiens
RDPWC

SEQ ID NO: 18103 - protein, 5 aa, Homo sapiens
YCSVL

SEQ ID NO: 18104 - protein, 5 aa, Homo sapiens
YAVVV

SEQ ID NO: 18105 - protein, 5 aa, Homo sapiens
CMRRT

SEQ ID NO: 18106 - protein, 5 aa, Homo sapiens
FLNSV

SEQ ID NO: 18107 - protein, 5 aa, Homo sapiens
KDQQK

SEQ ID NO: 18108 - protein, 5 aa, Homo sapiens
LWLLH

SEQ ID NO: 18109 - protein, 5 aa, Homo sapiens
FTVLC

SEQ ID NO: 18110 - protein, 5 aa, Homo sapiens
PPLAS

SEQ ID NO: 18111 - protein, 5 aa, Homo sapiens
KVTTV

SEQ ID NO: 18112 - protein, 5 aa, Homo sapiens
WNLKA

SEQ ID NO: 18113 - protein, 5 aa, Homo sapiens
GLWSG

SEQ ID NO: 18114 - protein, 5 aa, Homo sapiens
VERKQ

SEQ ID NO: 18115 - protein, 5 aa, Homo sapiens
MPWHL

SEQ ID NO: 18116 - protein, 5 aa, Homo sapiens
LLANL

SEQ ID NO: 18117 - protein, 5 aa, Homo sapiens
LERSH

SEQ ID NO: 18118 - protein, 5 aa, Homo sapiens
WPELD

SEQ ID NO: 18119 - protein, 5 aa, Homo sapiens
VTKDK

SEQ ID NO: 18120 - protein, 5 aa, Homo sapiens
FSLDN

SEQ ID NO: 18121 - protein, 5 aa, Homo sapiens
QNFSV

SEQ ID NO: 18122 - protein, 5 aa, Homo sapiens
TIVKE

SEQ ID NO: 18123 - protein, 5 aa, Homo sapiens
LVKTS

SEQ ID NO: 18124 - protein, 5 aa, Homo sapiens
GLYTP

SEQ ID NO: 18125 - protein, 5 aa, Homo sapiens
SAAGG

SEQ ID NO: 18126 - protein, 5 aa, Homo sapiens
HRKCF

SEQ ID NO: 18127 - protein, 5 aa, Homo sapiens
VKTIR

SEQ ID NO: 18128 - protein, 5 aa, Homo sapiens
ALKLL

SEQ ID NO: 18129 - protein, 5 aa, Homo sapiens
GPNQG

SEQ ID NO: 18130 - protein, 5 aa, Homo sapiens
MNLEF

SEQ ID NO: 18131 - protein, 5 aa, Homo sapiens
SYPTV

SEQ ID NO: 18132 - protein, 5 aa, Homo sapiens
NVTII

SEQ ID NO: 18133 - protein, 5 aa, Homo sapiens
VIANN

SEQ ID NO: 18134 - protein, 5 aa, Homo sapiens
PGKGL

SEQ ID NO: 18135 - protein, 5 aa, Homo sapiens
STNEE

SEQ ID NO: 18136 - protein, 5 aa, Homo sapiens
ELSNN

SEQ ID NO: 18137 - protein, 5 aa, Homo sapiens
VIANN

SEQ ID NO: 18138 - protein, 5 aa, Homo sapiens
STKAE

SEQ ID NO: 18139 - protein, 5 aa, Homo sapiens
KKASS

SEQ ID NO: 18140 - protein, 5 aa, Homo sapiens
SGFSL

SEQ ID NO: 18141 - protein, 5 aa, Homo sapiens
ETDQR

SEQ ID NO: 18142 - protein, 5 aa, Homo sapiens
EKMQL

SEQ ID NO: 18143 - protein, 5 aa, Homo sapiens
VFSSG

SEQ ID NO: 18144 - protein, 5 aa, Homo sapiens
TQQES

SEQ ID NO: 18145 - protein, 5 aa, Homo sapiens
FADDP

SEQ ID NO: 18146 - protein, 5 aa, Homo sapiens
VFSSG

SEQ ID NO: 18147 - protein, 5 aa, Homo sapiens
MFFFE

SEQ ID NO: 18148 - protein, 5 aa, Homo sapiens
QSTFK

SEQ ID NO: 18149 - protein, 5 aa, Homo sapiens
LTNGA

SEQ ID NO: 18150 - protein, 5 aa, Homo sapiens
MALGV

SEQ ID NO: 18151 - protein, 5 aa, Homo sapiens
EQAPD

SEQ ID NO: 18152 - protein, 5 aa, Homo sapiens
PRHKR

SEQ ID NO: 18153 - protein, 5 aa, Homo sapiens
ESFNI

SEQ ID NO: 18154 - protein, 5 aa, Homo sapiens
SSIAH

SEQ ID NO: 18155 - protein, 5 aa, Homo sapiens
PKINK

SEQ ID NO: 18156 - protein, 5 aa, Homo sapiens
TKDEL

SEQ ID NO: 18157 - protein, 5 aa, Homo sapiens
KTKGQ

SEQ ID NO: 18158 - protein, 5 aa, Homo sapiens
LPPPR

SEQ ID NO: 18159 - protein, 5 aa, Homo sapiens
SRSQL

SEQ ID NO: 18160 - protein, 5 aa, Homo sapiens
EVTNV

SEQ ID NO: 18161 - protein, 5 aa, Homo sapiens
DKKCH

SEQ ID NO: 18162 - protein, 5 aa, Homo sapiens
DYCVF

SEQ ID NO: 18163 - protein, 5 aa, Homo sapiens
ERETP

SEQ ID NO: 18164 - protein, 5 aa, Homo sapiens
ISELP

SEQ ID NO: 18165 - protein, 5 aa, Homo sapiens
KQWKK

SEQ ID NO: 18166 - protein, 5 aa, Homo sapiens
GADMW

SEQ ID NO: 18167 - protein, 5 aa, Homo sapiens
TLPFL

SEQ ID NO: 18168 - protein, 5 aa, Homo sapiens
KNYMI

SEQ ID NO: 18169 - protein, 5 aa, Homo sapiens
FHLCS

SEQ ID NO: 18170 - protein, 5 aa, Homo sapiens
LWSSQ

SEQ ID NO: 18171 - protein, 5 aa, Homo sapiens
SKEKL

SEQ ID NO: 18172 - protein, 5 aa, Homo sapiens
RILCR

SEQ ID NO: 18173 - protein, 5 aa, Homo sapiens
AVMVG

SEQ ID NO: 18174 - protein, 5 aa, Homo sapiens
FHLCS

SEQ ID NO: 18175 - protein, 5 aa, Homo sapiens
GIIAL

SEQ ID NO: 18176 - protein, 5 aa, Homo sapiens
RGRPA

SEQ ID NO: 18177 - protein, 5 aa, Homo sapiens
GAHRD

SEQ ID NO: 18178 - protein, 5 aa, Homo sapiens
VLEHE

SEQ ID NO: 18179 - protein, 5 aa, Homo sapiens
HSQDP

SEQ ID NO: 18180 - protein, 5 aa, Homo sapiens
KSKTT

SEQ ID NO: 18181 - protein, 5 aa, Homo sapiens
LHLCC

SEQ ID NO: 18182 - protein, 5 aa, Homo sapiens
GAFAL

SEQ ID NO: 18183 - protein, 5 aa, Homo sapiens
AEALK

SEQ ID NO: 18184 - protein, 5 aa, Homo sapiens
GQSQP

SEQ ID NO: 18185 - protein, 5 aa, Homo sapiens
DQYCC

SEQ ID NO: 18186 - protein, 5 aa, Homo sapiens
DQCCC

SEQ ID NO: 18187 - protein, 5 aa, Homo sapiens
KQSQC

SEQ ID NO: 18188 - protein, 5 aa, Homo sapiens
KQSQC

SEQ ID NO: 18189 - protein, 5 aa, Homo sapiens
WGRPA

SEQ ID NO: 18190 - protein, 5 aa, Homo sapiens
IEQTR

SEQ ID NO: 18191 - protein, 5 aa, Homo sapiens
DQYCC

SEQ ID NO: 18192 - protein, 5 aa, Homo sapiens
GSEYP

SEQ ID NO: 18193 - protein, 5 aa, Homo sapiens
GAIPG

SEQ ID NO: 18194 - protein, 5 aa, Homo sapiens
DQCCC

SEQ ID NO: 18195 - protein, 5 aa, Homo sapiens
WGRPA

SEQ ID NO: 18196 - protein, 5 aa, Homo sapiens
LGGGA

SEQ ID NO: 18197 - protein, 5 aa, Homo sapiens
PTPGP

SEQ ID NO: 18198 - protein, 5 aa, Homo sapiens
GQDDS

SEQ ID NO: 18199 - protein, 5 aa, Homo sapiens
WRKAI

SEQ ID NO: 18200 - protein, 5 aa, Homo sapiens
KSHLL

SEQ ID NO: 18201 - protein, 5 aa, Homo sapiens
LTRDK

SEQ ID NO: 18202 - protein, 5 aa, Homo sapiens
EVPYP

SEQ ID NO: 18203 - protein, 5 aa, Homo sapiens
STEGT

SEQ ID NO: 18204 - protein, 5 aa, Homo sapiens
YIKGI

SEQ ID NO: 18205 - protein, 5 aa, Homo sapiens
FKGRT

SEQ ID NO: 18206 - protein, 5 aa, Homo sapiens
RCCLL

SEQ ID NO: 18207 - protein, 5 aa, Homo sapiens
CEQAV

SEQ ID NO: 18208 - protein, 5 aa, Homo sapiens
RVREA

SEQ ID NO: 18209 - protein, 5 aa, Homo sapiens
VSLTA

SEQ ID NO: 18210 - protein, 5 aa, Homo sapiens
GAEVL

SEQ ID NO: 18211 - protein, 5 aa, Homo sapiens
QRVHT

SEQ ID NO: 18212 - protein, 5 aa, Homo sapiens
ITEEP

SEQ ID NO: 18213 - protein, 5 aa, Homo sapiens
RGNVS

SEQ ID NO: 18214 - protein, 5 aa, Homo sapiens
ISNTF

SEQ ID NO: 18215 - protein, 5 aa, Homo sapiens
QVSSL

SEQ ID NO: 18216 - protein, 5 aa, Homo sapiens
GARTW

SEQ ID NO: 18217 - protein, 5 aa, Homo sapiens
SSSTL

SEQ ID NO: 18218 - protein, 5 aa, Homo sapiens
SWFSD

SEQ ID NO: 18219 - protein, 5 aa, Homo sapiens
FDQVT

SEQ ID NO: 18220 - protein, 5 aa, Homo sapiens
PPKPM

SEQ ID NO: 18221 - protein, 5 aa, Homo sapiens
AGIQT

SEQ ID NO: 18222 - protein, 5 aa, Homo sapiens
GMKPS

SEQ ID NO: 18223 - protein, 5 aa, Homo sapiens
DVEGF

SEQ ID NO: 18224 - protein, 5 aa, Homo sapiens
CVHAL

SEQ ID NO: 18225 - protein, 5 aa, Homo sapiens
EATSQ

SEQ ID NO: 18226 - protein, 5 aa, Homo sapiens
EAHRF

SEQ ID NO: 18227 - protein, 5 aa, Homo sapiens
VICRE

SEQ ID NO: 18228 - protein, 5 aa, Homo sapiens
VKVLK

SEQ ID NO: 18229 - protein, 5 aa, Homo sapiens
LVELE

SEQ ID NO: 18230 - protein, 5 aa, Homo sapiens
LLNSP

SEQ ID NO: 18231 - protein, 5 aa, Homo sapiens
LSSLI

SEQ ID NO: 18232 - protein, 5 aa, Homo sapiens
QSLGR

SEQ ID NO: 18233 - protein, 5 aa, Homo sapiens
RNSGP

SEQ ID NO: 18234 - protein, 5 aa, Homo sapiens
IPSPR

SEQ ID NO: 18235 - protein, 5 aa, Homo sapiens
KAKAS

SEQ ID NO: 18236 - protein, 5 aa, Homo sapiens
RWWPF

SEQ ID NO: 18237 - protein, 5 aa, Homo sapiens
QHIKN

SEQ ID NO: 18238 - protein, 5 aa, Homo sapiens
STSAV

SEQ ID NO: 18239 - protein, 5 aa, Homo sapiens
NITNR

SEQ ID NO: 18240 - protein, 5 aa, Homo sapiens
NCIVA

SEQ ID NO: 18241 - protein, 5 aa, Homo sapiens
LVHTF

SEQ ID NO: 18242 - protein, 5 aa, Homo sapiens
NEVTV

SEQ ID NO: 18243 - protein, 5 aa, Homo sapiens
ADGPV

SEQ ID NO: 18244 - protein, 5 aa, Homo sapiens
NEWYV

SEQ ID NO: 18245 - protein, 5 aa, Homo sapiens
RCIYY

SEQ ID NO: 18246 - protein, 5 aa, Homo sapiens
HKLEV

SEQ ID NO: 18247 - protein, 5 aa, Homo sapiens
DSFKV

SEQ ID NO: 18248 - protein, 5 aa, Homo sapiens
PNQKS

SEQ ID NO: 18249 - protein, 5 aa, Homo sapiens
QNQFI

SEQ ID NO: 18250 - protein, 5 aa, Homo sapiens
DDDDF

SEQ ID NO: 18251 - protein, 5 aa, Homo sapiens
SDQCR

SEQ ID NO: 18252 - protein, 5 aa, Homo sapiens
MEHLK

SEQ ID NO: 18253 - protein, 5 aa, Homo sapiens
QPSWG

SEQ ID NO: 18254 - protein, 5 aa, Homo sapiens
VVKVD

SEQ ID NO: 18255 - protein, 5 aa, Homo sapiens
PLRTA

SEQ ID NO: 18256 - protein, 5 aa, Homo sapiens
QEAGS

SEQ ID NO: 18257 - protein, 5 aa, Homo sapiens
GSQPS

SEQ ID NO: 18258 - protein, 5 aa, Homo sapiens
GGCFY

SEQ ID NO: 18259 - protein, 5 aa, Homo sapiens
AQKDL

SEQ ID NO: 18260 - protein, 5 aa, Homo sapiens
TGAGK

SEQ ID NO: 18261 - protein, 5 aa, Homo sapiens
AQKDL

SEQ ID NO: 18262 - protein, 5 aa, Homo sapiens
MYGNE

SEQ ID NO: 18263 - protein, 5 aa, Homo sapiens
SSNGK

SEQ ID NO: 18264 - protein, 5 aa, Homo sapiens
TLKMK

SEQ ID NO: 18265 - protein, 5 aa, Homo sapiens
FHPCL

SEQ ID NO: 18266 - protein, 5 aa, Homo sapiens
REELG

SEQ ID NO: 18267 - protein, 5 aa, Homo sapiens
NCCNG

SEQ ID NO: 18268 - protein, 5 aa, Homo sapiens
AKETS

SEQ ID NO: 18269 - protein, 5 aa, Homo sapiens
CGTPL

SEQ ID NO: 18270 - protein, 5 aa, Homo sapiens
DITCP

SEQ ID NO: 18271 - protein, 5 aa, Homo sapiens
AKGCL

SEQ ID NO: 18272 - protein, 5 aa, Homo sapiens
LCSKP

SEQ ID NO: 18273 - protein, 5 aa, Homo sapiens
FITRA

SEQ ID NO: 18274 - protein, 5 aa, Homo sapiens
QNACS

SEQ ID NO: 18275 - protein, 5 aa, Homo sapiens
DLRIR

SEQ ID NO: 18276 - protein, 5 aa, Homo sapiens
SLSVK

SEQ ID NO: 18277 - protein, 5 aa, Homo sapiens
AETVD

SEQ ID NO: 18278 - protein, 5 aa, Homo sapiens
SQKQM

SEQ ID NO: 18279 - protein, 5 aa, Homo sapiens
FEFVS

SEQ ID NO: 18280 - protein, 5 aa, Homo sapiens
WSLLP

SEQ ID NO: 18281 - protein, 5 aa, Homo sapiens
GPPLP

SEQ ID NO: 18282 - protein, 5 aa, Homo sapiens
YEVIY

SEQ ID NO: 18283 - protein, 5 aa, Homo sapiens
LYRFI

SEQ ID NO: 18284 - protein, 5 aa, Homo sapiens
RRRPH

SEQ ID NO: 18285 - protein, 5 aa, Homo sapiens
CQYKI

SEQ ID NO: 18286 - protein, 5 aa, Homo sapiens
WSELV

SEQ ID NO: 18287 - protein, 5 aa, Homo sapiens
SRPRE

SEQ ID NO: 18288 - protein, 5 aa, Homo sapiens
KLGYF

SEQ ID NO: 18289 - protein, 5 aa, Homo sapiens
NGPPL

SEQ ID NO: 18290 - protein, 5 aa, Homo sapiens
VPECP

SEQ ID NO: 18291 - protein, 5 aa, Homo sapiens
GHILT

SEQ ID NO: 18292 - protein, 5 aa, Homo sapiens
QEWVS

SEQ ID NO: 18293 - protein, 5 aa, Homo sapiens
ETRWS

SEQ ID NO: 18294 - protein, 5 aa, Homo sapiens
PQLGH

SEQ ID NO: 18295 - protein, 5 aa, Homo sapiens
YQQYH

SEQ ID NO: 18296 - protein, 5 aa, Homo sapiens
ETEAP

SEQ ID NO: 18297 - protein, 5 aa, Homo sapiens
AKGLA

SEQ ID NO: 18298 - protein, 5 aa, Homo sapiens
ESLVY

SEQ ID NO: 18299 - protein, 5 aa, Homo sapiens
DLGRS

SEQ ID NO: 18300 - protein, 5 aa, Homo sapiens
EMHQL

SEQ ID NO: 18301 - protein, 5 aa, Homo sapiens
TKPAL

SEQ ID NO: 18302 - protein, 5 aa, Homo sapiens
AGNRT

SEQ ID NO: 18303 - protein, 5 aa, Homo sapiens
QPLNN

SEQ ID NO: 18304 - protein, 5 aa, Homo sapiens
QCLPL

SEQ ID NO: 18305 - protein, 5 aa, Homo sapiens
CPLSD

SEQ ID NO: 18306 - protein, 5 aa, Homo sapiens
PSILP

SEQ ID NO: 18307 - protein, 5 aa, Homo sapiens
VSPGA

SEQ ID NO: 18308 - protein, 5 aa, Homo sapiens
PVLVA

SEQ ID NO: 18309 - protein, 5 aa, Homo sapiens
EEGCR

SEQ ID NO: 18310 - protein, 5 aa, Homo sapiens
GEDEC

SEQ ID NO: 18311 - protein, 5 aa, Homo sapiens
EFNLV

SEQ ID NO: 18312 - protein, 5 aa, Homo sapiens
ASKRQ

SEQ ID NO: 18313 - protein, 5 aa, Homo sapiens
ESHSL

SEQ ID NO: 18314 - protein, 5 aa, Homo sapiens
GSSNQ

SEQ ID NO: 18315 - protein, 5 aa, Homo sapiens
SNVFG

SEQ ID NO: 18316 - protein, 5 aa, Homo sapiens
PSPSL

SEQ ID NO: 18317 - protein, 5 aa, Homo sapiens
GSSNQ

SEQ ID NO: 18318 - protein, 5 aa, Homo sapiens
DGDTD

SEQ ID NO: 18319 - protein, 5 aa, Homo sapiens
QSRER

SEQ ID NO: 18320 - protein, 5 aa, Homo sapiens
PHAAS

SEQ ID NO: 18321 - protein, 5 aa, Homo sapiens
KSPAS

SEQ ID NO: 18322 - protein, 5 aa, Homo sapiens
PTDWE

SEQ ID NO: 18323 - protein, 5 aa, Homo sapiens
ATSSG

SEQ ID NO: 18324 - protein, 5 aa, Homo sapiens
RSLWY

SEQ ID NO: 18325 - protein, 5 aa, Homo sapiens
AHKGS

SEQ ID NO: 18326 - protein, 5 aa, Homo sapiens
APLSS

SEQ ID NO: 18327 - protein, 5 aa, Homo sapiens
PQTAC

SEQ ID NO: 18328 - protein, 5 aa, Homo sapiens
SPHHL

SEQ ID NO: 18329 - protein, 5 aa, Homo sapiens
KGKWN

SEQ ID NO: 18330 - protein, 5 aa, Homo sapiens
TCVVQ

SEQ ID NO: 18331 - protein, 5 aa, Homo sapiens
SSEMT

SEQ ID NO: 18332 - protein, 5 aa, Homo sapiens
RKYLF

SEQ ID NO: 18333 - protein, 5 aa, Homo sapiens
LNKGL

SEQ ID NO: 18334 - protein, 5 aa, Homo sapiens
LTLKG

SEQ ID NO: 18335 - protein, 5 aa, Homo sapiens
ATPAW

SEQ ID NO: 18336 - protein, 5 aa, Homo sapiens
DEWDD

SEQ ID NO: 18337 - protein, 5 aa, Homo sapiens
FSLSS

SEQ ID NO: 18338 - protein, 5 aa, Homo sapiens
QVVRW

SEQ ID NO: 18339 - protein, 5 aa, Homo sapiens
VLVHS

SEQ ID NO: 18340 - protein, 5 aa, Homo sapiens
KVGAT

SEQ ID NO: 18341 - protein, 5 aa, Homo sapiens
LQRGK

SEQ ID NO: 18342 - protein, 5 aa, Homo sapiens
RRIHR

SEQ ID NO: 18343 - protein, 5 aa, Homo sapiens
LKEKP

SEQ ID NO: 18344 - protein, 5 aa, Homo sapiens
AHNSI

SEQ ID NO: 18345 - protein, 5 aa, Homo sapiens
PPQKL

SEQ ID NO: 18346 - protein, 5 aa, Homo sapiens
EVPSS

SEQ ID NO: 18347 - protein, 5 aa, Homo sapiens
ETLKH

SEQ ID NO: 18348 - protein, 5 aa, Homo sapiens
EHPLL

SEQ ID NO: 18349 - protein, 5 aa, Homo sapiens
VTKNL

SEQ ID NO: 18350 - protein, 5 aa, Homo sapiens
YCSGN

SEQ ID NO: 18351 - protein, 5 aa, Homo sapiens
SKGAW

SEQ ID NO: 18352 - protein, 5 aa, Homo sapiens
VVQIF

SEQ ID NO: 18353 - protein, 5 aa, Homo sapiens
YSYYQ

SEQ ID NO: 18354 - protein, 5 aa, Homo sapiens
DNYDN

SEQ ID NO: 18355 - protein, 5 aa, Homo sapiens
PSAEP

SEQ ID NO: 18356 - protein, 5 aa, Homo sapiens
ATAAS

SEQ ID NO: 18357 - protein, 5 aa, Homo sapiens
GPMQH

SEQ ID NO: 18358 - protein, 5 aa, Homo sapiens
LIKST

SEQ ID NO: 18359 - protein, 5 aa, Homo sapiens
PSTSD

SEQ ID NO: 18360 - protein, 5 aa, Homo sapiens
TRRFL

SEQ ID NO: 18361 - protein, 5 aa, Homo sapiens
KFHFN

SEQ ID NO: 18362 - protein, 5 aa, Homo sapiens
LLWMT

SEQ ID NO: 18363 - protein, 5 aa, Homo sapiens
TREPL

SEQ ID NO: 18364 - protein, 5 aa, Homo sapiens
TACKV

SEQ ID NO: 18365 - protein, 5 aa, Homo sapiens
SLPKI

SEQ ID NO: 18366 - protein, 5 aa, Homo sapiens
LQVTA

SEQ ID NO: 18367 - protein, 5 aa, Homo sapiens
HLPCH

SEQ ID NO: 18368 - protein, 5 aa, Homo sapiens
EDFKP

SEQ ID NO: 18369 - protein, 5 aa, Homo sapiens
NNANV

SEQ ID NO: 18370 - protein, 5 aa, Homo sapiens
KKSSD

SEQ ID NO: 18371 - protein, 5 aa, Homo sapiens
VRKPQ

SEQ ID NO: 18372 - protein, 5 aa, Homo sapiens
VLRCH

SEQ ID NO: 18373 - protein, 5 aa, Homo sapiens
RATQL

SEQ ID NO: 18374 - protein, 5 aa, Homo sapiens
NQENE

SEQ ID NO: 18375 - protein, 5 aa, Homo sapiens
KLSNL

SEQ ID NO: 18376 - protein, 5 aa, Homo sapiens
ALDWW

SEQ ID NO: 18377 - protein, 5 aa, Homo sapiens
CCCCF

SEQ ID NO: 18378 - protein, 5 aa, Homo sapiens
NFLYF

SEQ ID NO: 18379 - protein, 5 aa, Homo sapiens
VDMES

SEQ ID NO: 18380 - protein, 5 aa, Homo sapiens
RGLGL

SEQ ID NO: 18381 - protein, 5 aa, Homo sapiens
KNNHL

SEQ ID NO: 18382 - protein, 5 aa, Homo sapiens
AQIQW

SEQ ID NO: 18383 - protein, 5 aa, Homo sapiens
SEALP

SEQ ID NO: 18384 - protein, 5 aa, Homo sapiens
RMSGH

SEQ ID NO: 18385 - protein, 5 aa, Homo sapiens
ILKHK

SEQ ID NO: 18386 - protein, 5 aa, Homo sapiens
EEDDE

SEQ ID NO: 18387 - protein, 5 aa, Homo sapiens
EEDDE

SEQ ID NO: 18388 - protein, 5 aa, Homo sapiens
FETAL

SEQ ID NO: 18389 - protein, 5 aa, Homo sapiens
PPLCL

SEQ ID NO: 18390 - protein, 5 aa, Homo sapiens
FHLVR

SEQ ID NO: 18391 - protein, 5 aa, Homo sapiens
EEDDE

SEQ ID NO: 18392 - protein, 5 aa, Homo sapiens
FQNQN

SEQ ID NO: 18393 - protein, 5 aa, Homo sapiens
ILFSP

SEQ ID NO: 18394 - protein, 5 aa, Homo sapiens
SLKFS

SEQ ID NO: 18395 - protein, 5 aa, Homo sapiens
EEDDE

SEQ ID NO: 18396 - protein, 5 aa, Homo sapiens
VPPSL

SEQ ID NO: 18397 - protein, 5 aa, Homo sapiens
IFPPH

SEQ ID NO: 18398 - protein, 5 aa, Homo sapiens
TCQDA

SEQ ID NO: 18399 - protein, 5 aa, Homo sapiens
GKVET

SEQ ID NO: 18400 - protein, 5 aa, Homo sapiens
NWPQR

SEQ ID NO: 18401 - protein, 5 aa, Homo sapiens
EDKQQ

SEQ ID NO: 18402 - protein, 5 aa, Homo sapiens
YAAAL

SEQ ID NO: 18403 - protein, 5 aa, Homo sapiens
GLTQS

SEQ ID NO: 18404 - protein, 5 aa, Homo sapiens
KIQRI

SEQ ID NO: 18405 - protein, 5 aa, Homo sapiens
LNDVS

SEQ ID NO: 18406 - protein, 5 aa, Homo sapiens
SRPHF

SEQ ID NO: 18407 - protein, 5 aa, Homo sapiens
PAHPQ

SEQ ID NO: 18408 - protein, 5 aa, Homo sapiens
RDKGK

SEQ ID NO: 18409 - protein, 5 aa, Homo sapiens
SEGFP

SEQ ID NO: 18410 - protein, 5 aa, Homo sapiens
TAAAR

SEQ ID NO: 18411 - protein, 5 aa, Homo sapiens
PKASF

SEQ ID NO: 18412 - protein, 5 aa, Homo sapiens
PKASF

SEQ ID NO: 18413 - protein, 5 aa, Homo sapiens
LEGFH

SEQ ID NO: 18414 - protein, 5 aa, Homo sapiens
KQAKS

SEQ ID NO: 18415 - protein, 5 aa, Homo sapiens
GPQKP

SEQ ID NO: 18416 - protein, 5 aa, Homo sapiens
SGGHS

SEQ ID NO: 18417 - protein, 5 aa, Homo sapiens
EDYDS

SEQ ID NO: 18418 - protein, 5 aa, Homo sapiens
LLVVD

SEQ ID NO: 18419 - protein, 5 aa, Homo sapiens
HLLYK

SEQ ID NO: 18420 - protein, 5 aa, Homo sapiens
KEKGK

SEQ ID NO: 18421 - protein, 5 aa, Homo sapiens
AKYVL

SEQ ID NO: 18422 - protein, 5 aa, Homo sapiens
ERPSR

SEQ ID NO: 18423 - protein, 5 aa, Homo sapiens
SCSSD

SEQ ID NO: 18424 - protein, 5 aa, Homo sapiens
RSWEH

SEQ ID NO: 18425 - protein, 5 aa, Homo sapiens
AASSP

SEQ ID NO: 18426 - protein, 5 aa, Homo sapiens
SLCNF

SEQ ID NO: 18427 - protein, 5 aa, Homo sapiens
DGDLK

SEQ ID NO: 18428 - protein, 5 aa, Homo sapiens
YTEEA

SEQ ID NO: 18429 - protein, 5 aa, Homo sapiens
KLRLP

SEQ ID NO: 18430 - protein, 5 aa, Homo sapiens
ELLTS

SEQ ID NO: 18431 - protein, 5 aa, Homo sapiens
QPEDF

SEQ ID NO: 18432 - protein, 5 aa, Homo sapiens
QQATT

SEQ ID NO: 18433 - protein, 5 aa, Homo sapiens
RQDPT

SEQ ID NO: 18434 - protein, 5 aa, Homo sapiens
HKEGK

SEQ ID NO: 18435 - protein, 5 aa, Homo sapiens
ASKAH

SEQ ID NO: 18436 - protein, 5 aa, Homo sapiens
QRLCR

SEQ ID NO: 18437 - protein, 5 aa, Homo sapiens
YCIGG

SEQ ID NO: 18438 - protein, 5 aa, Homo sapiens
AQEKS

SEQ ID NO: 18439 - protein, 5 aa, Homo sapiens
EATED

SEQ ID NO: 18440 - protein, 5 aa, Homo sapiens
LPGIW

SEQ ID NO: 18441 - protein, 5 aa, Homo sapiens
LQKLS

SEQ ID NO: 18442 - protein, 5 aa, Homo sapiens
KKASH

SEQ ID NO: 18443 - protein, 5 aa, Homo sapiens
GSCML

SEQ ID NO: 18444 - protein, 5 aa, Homo sapiens
HENAI

SEQ ID NO: 18445 - protein, 5 aa, Homo sapiens
PETPL

SEQ ID NO: 18446 - protein, 5 aa, Homo sapiens
RKRFY

SEQ ID NO: 18447 - protein, 5 aa, Homo sapiens
TFSQF

SEQ ID NO: 18448 - protein, 5 aa, Homo sapiens
SFSCQ

SEQ ID NO: 18449 - protein, 5 aa, Homo sapiens
HSLSD

SEQ ID NO: 18450 - protein, 5 aa, Homo sapiens
LGLQA

SEQ ID NO: 18451 - protein, 5 aa, Homo sapiens
PRVLQ

SEQ ID NO: 18452 - protein, 5 aa, Homo sapiens
RLLGG

SEQ ID NO: 18453 - protein, 5 aa, Homo sapiens
TDEDD

SEQ ID NO: 18454 - protein, 5 aa, Homo sapiens
FEKPT

SEQ ID NO: 18455 - protein, 5 aa, Homo sapiens
TPQRL

SEQ ID NO: 18456 - protein, 5 aa, Homo sapiens
FDRRD

SEQ ID NO: 18457 - protein, 5 aa, Homo sapiens
KMTFL

SEQ ID NO: 18458 - protein, 5 aa, Homo sapiens
GFFVG

SEQ ID NO: 18459 - protein, 5 aa, Homo sapiens
FLPCS

SEQ ID NO: 18460 - protein, 5 aa, Homo sapiens
LANAL

SEQ ID NO: 18461 - protein, 5 aa, Homo sapiens
VDVET

SEQ ID NO: 18462 - protein, 5 aa, Homo sapiens
SWRAA

SEQ ID NO: 18463 - protein, 5 aa, Homo sapiens
HHLNQ

SEQ ID NO: 18464 - protein, 5 aa, Homo sapiens
PFSLL

SEQ ID NO: 18465 - protein, 5 aa, Homo sapiens
VPMEI

SEQ ID NO: 18466 - protein, 5 aa, Homo sapiens
VIRRL

SEQ ID NO: 18467 - protein, 5 aa, Homo sapiens
FPPPP

SEQ ID NO: 18468 - protein, 5 aa, Homo sapiens
QQWTW

SEQ ID NO: 18469 - protein, 5 aa, Homo sapiens
TETLD

SEQ ID NO: 18470 - protein, 5 aa, Homo sapiens
SKLTY

SEQ ID NO: 18471 - protein, 5 aa, Homo sapiens
QVNTW

SEQ ID NO: 18472 - protein, 5 aa, Homo sapiens
AMFKL

SEQ ID NO: 18473 - protein, 5 aa, Homo sapiens
LNPSH

SEQ ID NO: 18474 - protein, 5 aa, Homo sapiens
WEWGK

SEQ ID NO: 18475 - protein, 5 aa, Homo sapiens
MEVDV

SEQ ID NO: 18476 - protein, 5 aa, Homo sapiens
LMGWE

SEQ ID NO: 18477 - protein, 5 aa, Homo sapiens
FISMK

SEQ ID NO: 18478 - protein, 5 aa, Homo sapiens
FFCKK

SEQ ID NO: 18479 - protein, 5 aa, Homo sapiens
RNCKS

SEQ ID NO: 18480 - protein, 5 aa, Homo sapiens
MEVDV

SEQ ID NO: 18481 - protein, 5 aa, Homo sapiens
PNVLV

SEQ ID NO: 18482 - protein, 5 aa, Homo sapiens
ILTSA

SEQ ID NO: 18483 - protein, 5 aa, Homo sapiens
CKEQV

SEQ ID NO: 18484 - protein, 5 aa, Homo sapiens
NEIEY

SEQ ID NO: 18485 - protein, 5 aa, Homo sapiens
ARPGH

SEQ ID NO: 18486 - protein, 5 aa, Homo sapiens
FLAQK

SEQ ID NO: 18487 - protein, 5 aa, Homo sapiens
IEFVN

SEQ ID NO: 18488 - protein, 5 aa, Homo sapiens
SPVAH

SEQ ID NO: 18489 - protein, 5 aa, Homo sapiens
RYNWN

SEQ ID NO: 18490 - protein, 5 aa, Homo sapiens
PIVPI

SEQ ID NO: 18491 - protein, 5 aa, Homo sapiens
METSP

SEQ ID NO: 18492 - protein, 5 aa, Homo sapiens
VTLSQ

SEQ ID NO: 18493 - protein, 5 aa, Homo sapiens
AEAKT

SEQ ID NO: 18494 - protein, 5 aa, Homo sapiens
SGVQT

SEQ ID NO: 18495 - protein, 5 aa, Homo sapiens
FSATY

SEQ ID NO: 18496 - protein, 5 aa, Homo sapiens
ILIYY

SEQ ID NO: 18497 - protein, 5 aa, Homo sapiens
KYSSS

SEQ ID NO: 18498 - protein, 5 aa, Homo sapiens
EKTKK

SEQ ID NO: 18499 - protein, 5 aa, Homo sapiens
RLVRD

SEQ ID NO: 18500 - protein, 5 aa, Homo sapiens
RRRKF

SEQ ID NO: 18501 - protein, 5 aa, Homo sapiens
QEWLV

SEQ ID NO: 18502 - protein, 5 aa, Homo sapiens
HQPPK

SEQ ID NO: 18503 - protein, 5 aa, Homo sapiens
THYPP

SEQ ID NO: 18504 - protein, 5 aa, Homo sapiens
RDTEL

SEQ ID NO: 18505 - protein, 5 aa, Homo sapiens
VSEQC

SEQ ID NO: 18506 - protein, 5 aa, Homo sapiens
TLSGM

SEQ ID NO: 18507 - protein, 5 aa, Homo sapiens
VSCLL

SEQ ID NO: 18508 - protein, 5 aa, Homo sapiens
QSMNT

SEQ ID NO: 18509 - protein, 5 aa, Homo sapiens
DSAQD

SEQ ID NO: 18510 - protein, 5 aa, Homo sapiens
KRTGW

SEQ ID NO: 18511 - protein, 5 aa, Homo sapiens
PFQVW

SEQ ID NO: 18512 - protein, 5 aa, Homo sapiens
NWDMS

SEQ ID NO: 18513 - protein, 5 aa, Homo sapiens
HQENS

SEQ ID NO: 18514 - protein, 5 aa, Homo sapiens
SGKDA

SEQ ID NO: 18515 - protein, 5 aa, Homo sapiens
QPMVM

SEQ ID NO: 18516 - protein, 5 aa, Homo sapiens
RIGVR

SEQ ID NO: 18517 - protein, 5 aa, Homo sapiens
EFSEF

SEQ ID NO: 18518 - protein, 5 aa, Homo sapiens
IKQIG

SEQ ID NO: 18519 - protein, 5 aa, Homo sapiens
VCVCI

SEQ ID NO: 18520 - protein, 5 aa, Homo sapiens
ELSSK

SEQ ID NO: 18521 - protein, 5 aa, Homo sapiens
HCAKQ

SEQ ID NO: 18522 - protein, 5 aa, Homo sapiens
TCQEL

SEQ ID NO: 18523 - protein, 5 aa, Homo sapiens
KTLSQ

SEQ ID NO: 18524 - protein, 5 aa, Homo sapiens
PHHGV

SEQ ID NO: 18525 - protein, 5 aa, Homo sapiens
STLSY

SEQ ID NO: 18526 - protein, 5 aa, Homo sapiens
LQYFV

SEQ ID NO: 18527 - protein, 5 aa, Homo sapiens
KCKST

SEQ ID NO: 18528 - protein, 5 aa, Homo sapiens
TLIRH

SEQ ID NO: 18529 - protein, 5 aa, Homo sapiens
MEGVL

SEQ ID NO: 18530 - protein, 5 aa, Homo sapiens
ANKLY

SEQ ID NO: 18531 - protein, 5 aa, Homo sapiens
RGQEC

SEQ ID NO: 18532 - protein, 5 aa, Homo sapiens
SWCSL

SEQ ID NO: 18533 - protein, 5 aa, Homo sapiens
PNIKK

SEQ ID NO: 18534 - protein, 5 aa, Homo sapiens
PRLQE

SEQ ID NO: 18535 - protein, 5 aa, Homo sapiens
DESES

SEQ ID NO: 18536 - protein, 5 aa, Homo sapiens
IDREF

SEQ ID NO: 18537 - protein, 5 aa, Homo sapiens
KPRLY

SEQ ID NO: 18538 - protein, 5 aa, Homo sapiens
LEGLL

SEQ ID NO: 18539 - protein, 5 aa, Homo sapiens
RRPPH

SEQ ID NO: 18540 - protein, 5 aa, Homo sapiens
HVGVR

SEQ ID NO: 18541 - protein, 5 aa, Homo sapiens
TGNAL

SEQ ID NO: 18542 - protein, 5 aa, Homo sapiens
LDCFV

SEQ ID NO: 18543 - protein, 5 aa, Homo sapiens
YGFGG

SEQ ID NO: 18544 - protein, 5 aa, Homo sapiens
CFWWI

SEQ ID NO: 18545 - protein, 5 aa, Homo sapiens
QNIKI

SEQ ID NO: 18546 - protein, 5 aa, Homo sapiens
FLVVL

SEQ ID NO: 18547 - protein, 5 aa, Homo sapiens
QEHMQ

SEQ ID NO: 18548 - protein, 5 aa, Homo sapiens
LDQKS

SEQ ID NO: 18549 - protein, 5 aa, Homo sapiens
FRAHW

SEQ ID NO: 18550 - protein, 5 aa, Homo sapiens
LPKCL

SEQ ID NO: 18551 - protein, 5 aa, Homo sapiens
YTSSK

SEQ ID NO: 18552 - protein, 5 aa, Homo sapiens
DAFLG

SEQ ID NO: 18553 - protein, 5 aa, Homo sapiens
RATPT

SEQ ID NO: 18554 - protein, 5 aa, Homo sapiens
PQPSK

SEQ ID NO: 18555 - protein, 5 aa, Homo sapiens
ELPST

SEQ ID NO: 18556 - protein, 5 aa, Homo sapiens
VRLFT

SEQ ID NO: 18557 - protein, 5 aa, Homo sapiens
PRRRC

SEQ ID NO: 18558 - protein, 5 aa, Homo sapiens
KLESK

SEQ ID NO: 18559 - protein, 5 aa, Homo sapiens
FSWLL

SEQ ID NO: 18560 - protein, 5 aa, Homo sapiens
PRRRC

SEQ ID NO: 18561 - protein, 5 aa, Homo sapiens
KLESK

SEQ ID NO: 18562 - protein, 5 aa, Homo sapiens
LESKP

SEQ ID NO: 18563 - protein, 5 aa, Homo sapiens
VTSEQ

SEQ ID NO: 18564 - protein, 5 aa, Homo sapiens
SHGSP

SEQ ID NO: 18565 - protein, 5 aa, Homo sapiens
DWAKF

SEQ ID NO: 18566 - protein, 5 aa, Homo sapiens
QGGPC

SEQ ID NO: 18567 - protein, 5 aa, Homo sapiens
GSLEA

SEQ ID NO: 18568 - protein, 5 aa, Homo sapiens
FMFTH

SEQ ID NO: 18569 - protein, 5 aa, Homo sapiens
KIMTC

SEQ ID NO: 18570 - protein, 5 aa, Homo sapiens
TRKKP

SEQ ID NO: 18571 - protein, 5 aa, Homo sapiens
HAYKK

SEQ ID NO: 18572 - protein, 5 aa, Homo sapiens
SEREP

SEQ ID NO: 18573 - protein, 5 aa, Homo sapiens
TLSGL

SEQ ID NO: 18574 - protein, 5 aa, Homo sapiens
IKGEV

SEQ ID NO: 18575 - protein, 5 aa, Homo sapiens
DQVCT

SEQ ID NO: 18576 - protein, 5 aa, Homo sapiens
HHKAK

SEQ ID NO: 18577 - protein, 5 aa, Homo sapiens
ITNLS

SEQ ID NO: 18578 - protein, 5 aa, Homo sapiens
QLRVS

SEQ ID NO: 18579 - protein, 5 aa, Homo sapiens
VDILV

SEQ ID NO: 18580 - protein, 5 aa, Homo sapiens
PMFIW

SEQ ID NO: 18581 - protein, 5 aa, Homo sapiens
PRRPC

SEQ ID NO: 18582 - protein, 5 aa, Homo sapiens
GDTIC

SEQ ID NO: 18583 - protein, 5 aa, Homo sapiens
SRKTI

SEQ ID NO: 18584 - protein, 5 aa, Homo sapiens
LLLNV

SEQ ID NO: 18585 - protein, 5 aa, Homo sapiens
YVVSP

SEQ ID NO: 18586 - protein, 5 aa, Homo sapiens
LFSEK

SEQ ID NO: 18587 - protein, 5 aa, Homo sapiens
EMSPF

SEQ ID NO: 18588 - protein, 5 aa, Homo sapiens
THSLS

SEQ ID NO: 18589 - protein, 5 aa, Homo sapiens
KKEEC

SEQ ID NO: 18590 - protein, 5 aa, Homo sapiens
GGCEL

SEQ ID NO: 18591 - protein, 5 aa, Homo sapiens
LWEGI

SEQ ID NO: 18592 - protein, 5 aa, Homo sapiens
LFFFG

SEQ ID NO: 18593 - protein, 5 aa, Homo sapiens
KKEEC

SEQ ID NO: 18594 - protein, 5 aa, Homo sapiens
PMAIT

SEQ ID NO: 18595 - protein, 5 aa, Homo sapiens
PERSD

SEQ ID NO: 18596 - protein, 5 aa, Homo sapiens
GWRHM

SEQ ID NO: 18597 - protein, 5 aa, Homo sapiens
VVGPL

SEQ ID NO: 18598 - protein, 5 aa, Homo sapiens
QKALL

SEQ ID NO: 18599 - protein, 5 aa, Homo sapiens
HPGNP

SEQ ID NO: 18600 - protein, 5 aa, Homo sapiens
SSISS

SEQ ID NO: 18601 - protein, 5 aa, Homo sapiens
HPGNP

SEQ ID NO: 18602 - protein, 5 aa, Homo sapiens
LFSEK

SEQ ID NO: 18603 - protein, 5 aa, Homo sapiens
VEDSC

SEQ ID NO: 18604 - protein, 5 aa, Homo sapiens
QEHMQ

SEQ ID NO: 18605 - protein, 5 aa, Homo sapiens
DFLYP

SEQ ID NO: 18606 - protein, 5 aa, Homo sapiens
LFSEK

SEQ ID NO: 18607 - protein, 5 aa, Homo sapiens
EKEYE

SEQ ID NO: 18608 - protein, 5 aa, Homo sapiens
LHPVI

SEQ ID NO: 18609 - protein, 5 aa, Homo sapiens
PMAIT

SEQ ID NO: 18610 - protein, 5 aa, Homo sapiens
PMAIT

SEQ ID NO: 18611 - protein, 5 aa, Homo sapiens
PHLGF

SEQ ID NO: 18612 - protein, 5 aa, Homo sapiens
SEQPF

SEQ ID NO: 18613 - protein, 5 aa, Homo sapiens
RMGIS

SEQ ID NO: 18614 - protein, 5 aa, Homo sapiens
DPLSG

SEQ ID NO: 18615 - protein, 5 aa, Homo sapiens
KKEEC

SEQ ID NO: 18616 - protein, 5 aa, Homo sapiens
KGQGT

SEQ ID NO: 18617 - protein, 5 aa, Homo sapiens
IQVDD

SEQ ID NO: 18618 - protein, 5 aa, Homo sapiens
AQTSC

SEQ ID NO: 18619 - protein, 5 aa, Homo sapiens
KSTQF

SEQ ID NO: 18620 - protein, 5 aa, Homo sapiens
IDTDG

SEQ ID NO: 18621 - protein, 5 aa, Homo sapiens
PILSS

SEQ ID NO: 18622 - protein, 5 aa, Homo sapiens
SCPWL

SEQ ID NO: 18623 - protein, 5 aa, Homo sapiens
ALSAA

SEQ ID NO: 18624 - protein, 5 aa, Homo sapiens
PRRRC

SEQ ID NO: 18625 - protein, 5 aa, Homo sapiens
NWQSN

SEQ ID NO: 18626 - protein, 5 aa, Homo sapiens
PAWAT

SEQ ID NO: 18627 - protein, 5 aa, Homo sapiens
SRKKI

SEQ ID NO: 18628 - protein, 5 aa, Homo sapiens
KCEVA

SEQ ID NO: 18629 - protein, 5 aa, Homo sapiens
EWLEF

SEQ ID NO: 18630 - protein, 5 aa, Homo sapiens
FNEAQ

SEQ ID NO: 18631 - protein, 5 aa, Homo sapiens
FMFTH

SEQ ID NO: 18632 - protein, 5 aa, Homo sapiens
SSISS

SEQ ID NO: 18633 - protein, 5 aa, Homo sapiens
VIETV

SEQ ID NO: 18634 - protein, 5 aa, Homo sapiens
PERSD

SEQ ID NO: 18635 - protein, 5 aa, Homo sapiens
PMAIT

SEQ ID NO: 18636 - protein, 5 aa, Homo sapiens
HQQQL

SEQ ID NO: 18637 - protein, 5 aa, Homo sapiens
GFGKS

SEQ ID NO: 18638 - protein, 5 aa, Homo sapiens
LWEGI

SEQ ID NO: 18639 - protein, 5 aa, Homo sapiens
GEFLY

SEQ ID NO: 18640 - protein, 5 aa, Homo sapiens
GFGKS

SEQ ID NO: 18641 - protein, 5 aa, Homo sapiens
GKILK

SEQ ID NO: 18642 - protein, 5 aa, Homo sapiens
IGNKP

SEQ ID NO: 18643 - protein, 5 aa, Homo sapiens
GEFLY

SEQ ID NO: 18644 - protein, 5 aa, Homo sapiens
LWEGI

SEQ ID NO: 18645 - protein, 5 aa, Homo sapiens
LWEGI

SEQ ID NO: 18646 - protein, 5 aa, Homo sapiens
KLFLD

SEQ ID NO: 18647 - protein, 5 aa, Homo sapiens
LGMAA

SEQ ID NO: 18648 - protein, 5 aa, Homo sapiens
RDTQM

SEQ ID NO: 18649 - protein, 5 aa, Homo sapiens
PDELH

SEQ ID NO: 18650 - protein, 5 aa, Homo sapiens
KLYKV

SEQ ID NO: 18651 - protein, 5 aa, Homo sapiens
SAQAD

SEQ ID NO: 18652 - protein, 5 aa, Homo sapiens
HLMLT

SEQ ID NO: 18653 - protein, 5 aa, Homo sapiens
FRAIN

SEQ ID NO: 18654 - protein, 5 aa, Homo sapiens
GGGWT

SEQ ID NO: 18655 - protein, 5 aa, Homo sapiens
KRHQN

SEQ ID NO: 18656 - protein, 5 aa, Homo sapiens
RVVLE

SEQ ID NO: 18657 - protein, 5 aa, Homo sapiens
WEVQL

SEQ ID NO: 18658 - protein, 5 aa, Homo sapiens
YVACT

SEQ ID NO: 18659 - protein, 5 aa, Homo sapiens
PDDRM

SEQ ID NO: 18660 - protein, 5 aa, Homo sapiens
LKAFH

SEQ ID NO: 18661 - protein, 5 aa, Homo sapiens
RSDLI

SEQ ID NO: 18662 - protein, 5 aa, Homo sapiens
PQKNS

SEQ ID NO: 18663 - protein, 5 aa, Homo sapiens
CRKMK

SEQ ID NO: 18664 - protein, 5 aa, Homo sapiens
AVRTL

SEQ ID NO: 18665 - protein, 5 aa, Homo sapiens
PEYSE

SEQ ID NO: 18666 - protein, 5 aa, Homo sapiens
TGVHA

SEQ ID NO: 18667 - protein, 5 aa, Homo sapiens
QPSCC

SEQ ID NO: 18668 - protein, 5 aa, Homo sapiens
QPSCC

SEQ ID NO: 18669 - protein, 5 aa, Homo sapiens
HPAPM

SEQ ID NO: 18670 - protein, 5 aa, Homo sapiens
YQPKF

SEQ ID NO: 18671 - protein, 5 aa, Homo sapiens
SGSCC

SEQ ID NO: 18672 - protein, 5 aa, Homo sapiens
YTSSK

SEQ ID NO: 18673 - protein, 5 aa, Homo sapiens
NGPEA

SEQ ID NO: 18674 - protein, 5 aa, Homo sapiens
YGFGG

SEQ ID NO: 18675 - protein, 5 aa, Homo sapiens
YLVPL

SEQ ID NO: 18676 - protein, 5 aa, Homo sapiens
CQPSC

SEQ ID NO: 18677 - protein, 5 aa, Homo sapiens
CEPTC

SEQ ID NO: 18678 - protein, 5 aa, Homo sapiens
AARAP

SEQ ID NO: 18679 - protein, 5 aa, Homo sapiens
ENCCL

SEQ ID NO: 18680 - protein, 5 aa, Homo sapiens
LFKNN

SEQ ID NO: 18681 - protein, 5 aa, Homo sapiens
ASTAL

SEQ ID NO: 18682 - protein, 5 aa, Homo sapiens
MKLGK

SEQ ID NO: 18683 - protein, 5 aa, Homo sapiens
RGERA

SEQ ID NO: 18684 - protein, 5 aa, Homo sapiens
KLDSI

SEQ ID NO: 18685 - protein, 5 aa, Homo sapiens
LEDGF

SEQ ID NO: 18686 - protein, 5 aa, Homo sapiens
LQRGP

SEQ ID NO: 18687 - protein, 5 aa, Homo sapiens
IREEG

SEQ ID NO: 18688 - protein, 5 aa, Homo sapiens
DILYK

SEQ ID NO: 18689 - protein, 5 aa, Homo sapiens
RRKIT

SEQ ID NO: 18690 - protein, 5 aa, Homo sapiens
GGCCH

SEQ ID NO: 18691 - protein, 5 aa, Homo sapiens
AEQTV

SEQ ID NO: 18692 - protein, 5 aa, Homo sapiens
YGFGG

SEQ ID NO: 18693 - protein, 5 aa, Homo sapiens
QPPPP

SEQ ID NO: 18694 - protein, 5 aa, Homo sapiens
QCSSP

SEQ ID NO: 18695 - protein, 5 aa, Homo sapiens
ENMTS

SEQ ID NO: 18696 - protein, 5 aa, Homo sapiens
KKKAE

SEQ ID NO: 18697 - protein, 5 aa, Homo sapiens
KLTWS

SEQ ID NO: 18698 - protein, 5 aa, Homo sapiens
DIAKY

SEQ ID NO: 18699 - protein, 5 aa, Homo sapiens
LTWDS

SEQ ID NO: 18700 - protein, 5 aa, Homo sapiens
LWRPW

SEQ ID NO: 18701 - protein, 5 aa, Homo sapiens
APHTG

SEQ ID NO: 18702 - protein, 5 aa, Homo sapiens
EKGHS

SEQ ID NO: 18703 - protein, 5 aa, Homo sapiens
VIKQP

SEQ ID NO: 18704 - protein, 5 aa, Homo sapiens
TLTRL

SEQ ID NO: 18705 - protein, 5 aa, Homo sapiens
AEPQP

SEQ ID NO: 18706 - protein, 5 aa, Homo sapiens
KEHQL

SEQ ID NO: 18707 - protein, 5 aa, Homo sapiens
EGVLY

SEQ ID NO: 18708 - protein, 5 aa, Homo sapiens
EKNGL

SEQ ID NO: 18709 - protein, 5 aa, Homo sapiens
GEKSS

SEQ ID NO: 18710 - protein, 5 aa, Homo sapiens
EDVKR

SEQ ID NO: 18711 - protein, 5 aa, Homo sapiens
FPYAA

SEQ ID NO: 18712 - protein, 5 aa, Homo sapiens
FSFFP

SEQ ID NO: 18713 - protein, 5 aa, Homo sapiens
GDDLN

SEQ ID NO: 18714 - protein, 5 aa, Homo sapiens
TFTHL

SEQ ID NO: 18715 - protein, 5 aa, Homo sapiens
HFGKC

SEQ ID NO: 18716 - protein, 5 aa, Homo sapiens
YVNPC

SEQ ID NO: 18717 - protein, 5 aa, Homo sapiens
AAKNR

SEQ ID NO: 18718 - protein, 5 aa, Homo sapiens
VAVRK

SEQ ID NO: 18719 - protein, 5 aa, Homo sapiens
APVLP

SEQ ID NO: 18720 - protein, 5 aa, Homo sapiens
TDIAY

SEQ ID NO: 18721 - protein, 5 aa, Homo sapiens
TDIAY

SEQ ID NO: 18722 - protein, 5 aa, Homo sapiens
TDIAY

SEQ ID NO: 18723 - protein, 5 aa, Homo sapiens
TDIAY

SEQ ID NO: 18724 - protein, 5 aa, Homo sapiens
TDIAY

SEQ ID NO: 18725 - protein, 5 aa, Homo sapiens
HGLLV

SEQ ID NO: 18726 - protein, 5 aa, Homo sapiens
DTVEN

SEQ ID NO: 18727 - protein, 5 aa, Homo sapiens
REHPT

SEQ ID NO: 18728 - protein, 5 aa, Homo sapiens
ANENV

SEQ ID NO: 18729 - protein, 5 aa, Homo sapiens
VGLSA

SEQ ID NO: 18730 - protein, 5 aa, Homo sapiens
DCGQL

SEQ ID NO: 18731 - protein, 5 aa, Homo sapiens
GGRSP

SEQ ID NO: 18732 - protein, 5 aa, Homo sapiens
AELER

SEQ ID NO: 18733 - protein, 5 aa, Homo sapiens
LPPKK

SEQ ID NO: 18734 - protein, 5 aa, Homo sapiens
LKINP

SEQ ID NO: 18735 - protein, 5 aa, Homo sapiens
ILGMV

SEQ ID NO: 18736 - protein, 5 aa, Homo sapiens
KLNKI

SEQ ID NO: 18737 - protein, 5 aa, Homo sapiens
LWTYN

SEQ ID NO: 18738 - protein, 5 aa, Homo sapiens
PSASS

SEQ ID NO: 18739 - protein, 5 aa, Homo sapiens
RNSCA

SEQ ID NO: 18740 - protein, 5 aa, Homo sapiens
EWKKY

SEQ ID NO: 18741 - protein, 5 aa, Homo sapiens
ASCTD

SEQ ID NO: 18742 - protein, 5 aa, Homo sapiens
QICNQ

SEQ ID NO: 18743 - protein, 5 aa, Homo sapiens
VPSAG

SEQ ID NO: 18744 - protein, 5 aa, Homo sapiens
SRASR

SEQ ID NO: 18745 - protein, 5 aa, Homo sapiens
GVTVR

SEQ ID NO: 18746 - protein, 5 aa, Homo sapiens
FRTVL

SEQ ID NO: 18747 - protein, 5 aa, Homo sapiens
PQQHF

SEQ ID NO: 18748 - protein, 5 aa, Homo sapiens
LELEA

SEQ ID NO: 18749 - protein, 5 aa, Homo sapiens
VENKA

SEQ ID NO: 18750 - protein, 5 aa, Homo sapiens
PCEGV

SEQ ID NO: 18751 - protein, 5 aa, Homo sapiens
LTNRN

SEQ ID NO: 18752 - protein, 5 aa, Homo sapiens
ATGVS

SEQ ID NO: 18753 - protein, 5 aa, Homo sapiens
WREAE

SEQ ID NO: 18754 - protein, 5 aa, Homo sapiens
ATGIF

SEQ ID NO: 18755 - protein, 5 aa, Homo sapiens
SQSRR

SEQ ID NO: 18756 - protein, 5 aa, Homo sapiens
ATSDL

SEQ ID NO: 18757 - protein, 5 aa, Homo sapiens
GKIFK

SEQ ID NO: 18758 - protein, 5 aa, Homo sapiens
STKKE

SEQ ID NO: 18759 - protein, 5 aa, Homo sapiens
IHEKV

SEQ ID NO: 18760 - protein, 5 aa, Homo sapiens
EADTT

SEQ ID NO: 18761 - protein, 5 aa, Homo sapiens
DEAHS

SEQ ID NO: 18762 - protein, 5 aa, Homo sapiens
LGLAS

SEQ ID NO: 18763 - protein, 5 aa, Homo sapiens
SLYYS

SEQ ID NO: 18764 - protein, 5 aa, Homo sapiens
GEAQI

SEQ ID NO: 18765 - protein, 5 aa, Homo sapiens
AKPCI

SEQ ID NO: 18766 - protein, 5 aa, Homo sapiens
FMTQS

SEQ ID NO: 18767 - protein, 5 aa, Homo sapiens
KPSSL

SEQ ID NO: 18768 - protein, 5 aa, Homo sapiens
EECNS

SEQ ID NO: 18769 - protein, 5 aa, Homo sapiens
EVKKQ

SEQ ID NO: 18770 - protein, 5 aa, Homo sapiens
GDVGD

SEQ ID NO: 18771 - protein, 5 aa, Homo sapiens
LLVRV

SEQ ID NO: 18772 - protein, 5 aa, Homo sapiens
FLSFN

SEQ ID NO: 18773 - protein, 5 aa, Homo sapiens
KFTNK

SEQ ID NO: 18774 - protein, 5 aa, Homo sapiens
EEEDL

SEQ ID NO: 18775 - protein, 5 aa, Homo sapiens
KTPEA

SEQ ID NO: 18776 - protein, 5 aa, Homo sapiens
STITI

SEQ ID NO: 18777 - protein, 5 aa, Homo sapiens
TPLST

SEQ ID NO: 18778 - protein, 5 aa, Homo sapiens
KDYRS

SEQ ID NO: 18779 - protein, 5 aa, Homo sapiens
QEELK

SEQ ID NO: 18780 - protein, 5 aa, Homo sapiens
NLSPE

SEQ ID NO: 18781 - protein, 5 aa, Homo sapiens
EKNNS

SEQ ID NO: 18782 - protein, 5 aa, Homo sapiens
GKKSQ

SEQ ID NO: 18783 - protein, 5 aa, Homo sapiens
KHAGE

SEQ ID NO: 18784 - protein, 5 aa, Homo sapiens
NEQLF

SEQ ID NO: 18785 - protein, 5 aa, Homo sapiens
RTETQ

SEQ ID NO: 18786 - protein, 5 aa, Homo sapiens
LLSVL

SEQ ID NO: 18787 - protein, 5 aa, Homo sapiens
AFNIK

SEQ ID NO: 18788 - protein, 5 aa, Homo sapiens
PYMPE

SEQ ID NO: 18789 - protein, 5 aa, Homo sapiens
GRWRL

SEQ ID NO: 18790 - protein, 5 aa, Homo sapiens
KEEKL

SEQ ID NO: 18791 - protein, 5 aa, Homo sapiens
FFLIK

SEQ ID NO: 18792 - protein, 5 aa, Homo sapiens
YLWKL

SEQ ID NO: 18793 - protein, 5 aa, Homo sapiens
NVSHK

SEQ ID NO: 18794 - protein, 5 aa, Homo sapiens
LKIMS

SEQ ID NO: 18795 - protein, 5 aa, Homo sapiens
PLEIH

SEQ ID NO: 18796 - protein, 5 aa, Homo sapiens
QSCDP

SEQ ID NO: 18797 - protein, 5 aa, Homo sapiens
SYLDS

SEQ ID NO: 18798 - protein, 5 aa, Homo sapiens
FEFWL

SEQ ID NO: 18799 - protein, 5 aa, Homo sapiens
SSKST

SEQ ID NO: 18800 - protein, 5 aa, Homo sapiens
PLRPA

SEQ ID NO: 18801 - protein, 5 aa, Homo sapiens
GLVLQ

SEQ ID NO: 18802 - protein, 5 aa, Homo sapiens
LAPVA

SEQ ID NO: 18803 - protein, 5 aa, Homo sapiens
SVFIP

SEQ ID NO: 18804 - protein, 5 aa, Homo sapiens
KVIYQ

SEQ ID NO: 18805 - protein, 5 aa, Homo sapiens
PSLSD

SEQ ID NO: 18806 - protein, 5 aa, Homo sapiens
ASWLL

SEQ ID NO: 18807 - protein, 5 aa, Homo sapiens
VNARL

SEQ ID NO: 18808 - protein, 5 aa, Homo sapiens
PAACR

SEQ ID NO: 18809 - protein, 5 aa, Homo sapiens
DSIFY

SEQ ID NO: 18810 - protein, 5 aa, Homo sapiens
AESTP

SEQ ID NO: 18811 - protein, 5 aa, Homo sapiens
FEMMI

SEQ ID NO: 18812 - protein, 5 aa, Homo sapiens
FEISC

SEQ ID NO: 18813 - protein, 5 aa, Homo sapiens
KATPK

SEQ ID NO: 18814 - protein, 5 aa, Homo sapiens
LDIIL

SEQ ID NO: 18815 - protein, 5 aa, Homo sapiens
DIERL

SEQ ID NO: 18816 - protein, 5 aa, Homo sapiens
SYFLV

SEQ ID NO: 18817 - protein, 5 aa, Homo sapiens
VRKRQ

SEQ ID NO: 18818 - protein, 5 aa, Homo sapiens
CSKDR

SEQ ID NO: 18819 - protein, 5 aa, Homo sapiens
SISNF

SEQ ID NO: 18820 - protein, 5 aa, Homo sapiens
LIFYA

SEQ ID NO: 18821 - protein, 5 aa, Homo sapiens
TTTTM

SEQ ID NO: 18822 - protein, 5 aa, Homo sapiens
TYAKR

SEQ ID NO: 18823 - protein, 5 aa, Homo sapiens
GFQVS

SEQ ID NO: 18824 - protein, 5 aa, Homo sapiens
KIYAY

SEQ ID NO: 18825 - protein, 5 aa, Homo sapiens
PLLNP

SEQ ID NO: 18826 - protein, 5 aa, Homo sapiens
SMDRR

SEQ ID NO: 18827 - protein, 5 aa, Homo sapiens
RILEI

SEQ ID NO: 18828 - protein, 5 aa, Homo sapiens
VTVVR

SEQ ID NO: 18829 - protein, 5 aa, Homo sapiens
RSVMD

SEQ ID NO: 18830 - protein, 5 aa, Homo sapiens
KEYYV

SEQ ID NO: 18831 - protein, 5 aa, Homo sapiens
SLLDT

SEQ ID NO: 18832 - protein, 5 aa, Homo sapiens
AANPE

SEQ ID NO: 18833 - protein, 5 aa, Homo sapiens
IMQNF

SEQ ID NO: 18834 - protein, 5 aa, Homo sapiens
GKCIA

SEQ ID NO: 18835 - protein, 5 aa, Homo sapiens
EAEIH

SEQ ID NO: 18836 - protein, 5 aa, Homo sapiens
GPIKP

SEQ ID NO: 18837 - protein, 5 aa, Homo sapiens
RAAGE

SEQ ID NO: 18838 - protein, 5 aa, Homo sapiens
KKEIS

SEQ ID NO: 18839 - protein, 5 aa, Homo sapiens
QDCSH

SEQ ID NO: 18840 - protein, 5 aa, Homo sapiens
SSLSY

SEQ ID NO: 18841 - protein, 5 aa, Homo sapiens
FTGLG

SEQ ID NO: 18842 - protein, 5 aa, Homo sapiens
VLLPA

SEQ ID NO: 18843 - protein, 5 aa, Homo sapiens
GGDSA

SEQ ID NO: 18844 - protein, 5 aa, Homo sapiens
SVTGL

SEQ ID NO: 18845 - protein, 5 aa, Homo sapiens
LELKA

SEQ ID NO: 18846 - protein, 5 aa, Homo sapiens
GKIGF

SEQ ID NO: 18847 - protein, 5 aa, Homo sapiens
LELSA

SEQ ID NO: 18848 - protein, 5 aa, Homo sapiens
PLFVE

SEQ ID NO: 18849 - protein, 5 aa, Homo sapiens
RDKAR

SEQ ID NO: 18850 - protein, 5 aa, Homo sapiens
LELSA

SEQ ID NO: 18851 - protein, 5 aa, Homo sapiens
AETGA

SEQ ID NO: 18852 - protein, 5 aa, Homo sapiens
WFSPY

SEQ ID NO: 18853 - protein, 5 aa, Homo sapiens
LLQYE

SEQ ID NO: 18854 - protein, 5 aa, Homo sapiens
LRGRK

SEQ ID NO: 18855 - protein, 5 aa, Homo sapiens
MLWAL

SEQ ID NO: 18856 - protein, 5 aa, Homo sapiens
IEIAS

SEQ ID NO: 18857 - protein, 5 aa, Homo sapiens
IPMLN

SEQ ID NO: 18858 - protein, 5 aa, Homo sapiens
VETDV

SEQ ID NO: 18859 - protein, 5 aa, Homo sapiens
AALKT

SEQ ID NO: 18860 - protein, 5 aa, Homo sapiens
SVKPS

SEQ ID NO: 18861 - protein, 5 aa, Homo sapiens
EAGQS

SEQ ID NO: 18862 - protein, 5 aa, Homo sapiens
ILTNR

SEQ ID NO: 18863 - protein, 5 aa, Homo sapiens
FVIEQ

SEQ ID NO: 18864 - protein, 5 aa, Homo sapiens
SKIHS

SEQ ID NO: 18865 - protein, 5 aa, Homo sapiens
RGSVP

SEQ ID NO: 18866 - protein, 5 aa, Homo sapiens
TLRSY

SEQ ID NO: 18867 - protein, 5 aa, Homo sapiens
QRRCF

SEQ ID NO: 18868 - protein, 5 aa, Homo sapiens
GVGCP

SEQ ID NO: 18869 - protein, 5 aa, Homo sapiens
QSLFS

SEQ ID NO: 18870 - protein, 5 aa, Homo sapiens
VSVLM

SEQ ID NO: 18871 - protein, 5 aa, Homo sapiens
RCRVW

SEQ ID NO: 18872 - protein, 5 aa, Homo sapiens
LMESV

SEQ ID NO: 18873 - protein, 5 aa, Homo sapiens
ESGRS

SEQ ID NO: 18874 - protein, 5 aa, Homo sapiens
QKLTQ

SEQ ID NO: 18875 - protein, 5 aa, Homo sapiens
LCCLP

SEQ ID NO: 18876 - protein, 5 aa, Homo sapiens
SGKKA

SEQ ID NO: 18877 - protein, 5 aa, Homo sapiens
RPASV

SEQ ID NO: 18878 - protein, 5 aa, Homo sapiens
ITDQA

SEQ ID NO: 18879 - protein, 5 aa, Homo sapiens
LMVLK

SEQ ID NO: 18880 - protein, 5 aa, Homo sapiens
KIRMD

SEQ ID NO: 18881 - protein, 5 aa, Homo sapiens
ISSVK

SEQ ID NO: 18882 - protein, 5 aa, Homo sapiens
TTDDK

SEQ ID NO: 18883 - protein, 5 aa, Homo sapiens
PKTEL

SEQ ID NO: 18884 - protein, 5 aa, Homo sapiens
MEGDD

SEQ ID NO: 18885 - protein, 5 aa, Homo sapiens
SDNYW

SEQ ID NO: 18886 - protein, 5 aa, Homo sapiens
QISKT

SEQ ID NO: 18887 - protein, 5 aa, Homo sapiens
YLFRG

SEQ ID NO: 18888 - protein, 5 aa, Homo sapiens
LWRPW

SEQ ID NO: 18889 - protein, 5 aa, Homo sapiens
YAAVA

SEQ ID NO: 18890 - protein, 5 aa, Homo sapiens
YRRTL

SEQ ID NO: 18891 - protein, 5 aa, Homo sapiens
EVPAE

SEQ ID NO: 18892 - protein, 5 aa, Homo sapiens
STLGG

SEQ ID NO: 18893 - protein, 5 aa, Homo sapiens
LECSQ

SEQ ID NO: 18894 - protein, 5 aa, Homo sapiens
NRFHA

SEQ ID NO: 18895 - protein, 5 aa, Homo sapiens
EPTFP

SEQ ID NO: 18896 - protein, 5 aa, Homo sapiens
LRVCW

SEQ ID NO: 18897 - protein, 5 aa, Homo sapiens
VLLRL

SEQ ID NO: 18898 - protein, 5 aa, Homo sapiens
AQEKM

SEQ ID NO: 18899 - protein, 5 aa, Homo sapiens
NLPVP

SEQ ID NO: 18900 - protein, 5 aa, Homo sapiens
PLLAT

SEQ ID NO: 18901 - protein, 5 aa, Homo sapiens
LTKHG

SEQ ID NO: 18902 - protein, 5 aa, Homo sapiens
TEEGS

SEQ ID NO: 18903 - protein, 5 aa, Homo sapiens
YLELK

SEQ ID NO: 18904 - protein, 5 aa, Homo sapiens
DSKKN

SEQ ID NO: 18905 - protein, 5 aa, Homo sapiens
VLSHC

SEQ ID NO: 18906 - protein, 5 aa, Homo sapiens
SGLYP

SEQ ID NO: 18907 - protein, 5 aa, Homo sapiens
LVAPC

SEQ ID NO: 18908 - protein, 5 aa, Homo sapiens
PPAPR

SEQ ID NO: 18909 - protein, 5 aa, Homo sapiens
QTCNT

SEQ ID NO: 18910 - protein, 5 aa, Homo sapiens
HPRKD

SEQ ID NO: 18911 - protein, 5 aa, Homo sapiens
AELEP

SEQ ID NO: 18912 - protein, 5 aa, Homo sapiens
GYRSE

SEQ ID NO: 18913 - protein, 5 aa, Homo sapiens
RHPPH

SEQ ID NO: 18914 - protein, 5 aa, Homo sapiens
PRMGF

SEQ ID NO: 18915 - protein, 5 aa, Homo sapiens
TGPCW

SEQ ID NO: 18916 - protein, 5 aa, Homo sapiens
PGSQG

SEQ ID NO: 18917 - protein, 5 aa, Homo sapiens
APKAS

SEQ ID NO: 18918 - protein, 5 aa, Homo sapiens
EDTHL

SEQ ID NO: 18919 - protein, 5 aa, Homo sapiens
QVLLV

SEQ ID NO: 18920 - protein, 5 aa, Homo sapiens
TLICS

SEQ ID NO: 18921 - protein, 5 aa, Homo sapiens
TEESV

SEQ ID NO: 18922 - protein, 5 aa, Homo sapiens
QTPKL

SEQ ID NO: 18923 - protein, 5 aa, Homo sapiens
EYNAL

SEQ ID NO: 18924 - protein, 5 aa, Homo sapiens
AITPG

SEQ ID NO: 18925 - protein, 5 aa, Homo sapiens
KLVHS

SEQ ID NO: 18926 - protein, 5 aa, Homo sapiens
GFDAQ

SEQ ID NO: 18927 - protein, 5 aa, Homo sapiens
AAYAM

SEQ ID NO: 18928 - protein, 5 aa, Homo sapiens
NKENF

SEQ ID NO: 18929 - protein, 5 aa, Homo sapiens
VLTGP

SEQ ID NO: 18930 - protein, 5 aa, Homo sapiens
LKIWN

SEQ ID NO: 18931 - protein, 5 aa, Homo sapiens
DESET

SEQ ID NO: 18932 - protein, 5 aa, Homo sapiens
DLCSA

SEQ ID NO: 18933 - protein, 5 aa, Homo sapiens
FSVFV

SEQ ID NO: 18934 - protein, 5 aa, Homo sapiens
SVRIF

SEQ ID NO: 18935 - protein, 5 aa, Homo sapiens
PGATS

SEQ ID NO: 18936 - protein, 5 aa, Homo sapiens
VTTIK

SEQ ID NO: 18937 - protein, 5 aa, Homo sapiens
FSLKF

SEQ ID NO: 18938 - protein, 5 aa, Homo sapiens
ASEED

SEQ ID NO: 18939 - protein, 5 aa, Homo sapiens
KEYFF

SEQ ID NO: 18940 - protein, 5 aa, Homo sapiens
RSMEY

SEQ ID NO: 18941 - protein, 5 aa, Homo sapiens
LVKNQ

SEQ ID NO: 18942 - protein, 5 aa, Homo sapiens
FQLPI

SEQ ID NO: 18943 - protein, 5 aa, Homo sapiens
ALTFK

SEQ ID NO: 18944 - protein, 5 aa, Homo sapiens
ERTNL

SEQ ID NO: 18945 - protein, 5 aa, Homo sapiens
GSSQG

SEQ ID NO: 18946 - protein, 5 aa, Homo sapiens
YENDK

SEQ ID NO: 18947 - protein, 5 aa, Homo sapiens
AKAES

SEQ ID NO: 18948 - protein, 5 aa, Homo sapiens
PLLLT

SEQ ID NO: 18949 - protein, 5 aa, Homo sapiens
NRHHT

SEQ ID NO: 18950 - protein, 5 aa, Homo sapiens
IGEKP

SEQ ID NO: 18951 - protein, 5 aa, Homo sapiens
KVSCV

SEQ ID NO: 18952 - protein, 5 aa, Homo sapiens
EEEEK

SEQ ID NO: 18953 - protein, 5 aa, Homo sapiens
FPPTT

SEQ ID NO: 18954 - protein, 5 aa, Homo sapiens
LLRIF

SEQ ID NO: 18955 - protein, 5 aa, Homo sapiens
SILCR

SEQ ID NO: 18956 - protein, 5 aa, Homo sapiens
HFLGA

SEQ ID NO: 18957 - protein, 5 aa, Homo sapiens
MSGST

SEQ ID NO: 18958 - protein, 5 aa, Homo sapiens
RQLMT

SEQ ID NO: 18959 - protein, 5 aa, Homo sapiens
KYLNA

SEQ ID NO: 18960 - protein, 5 aa, Homo sapiens
REGFL

SEQ ID NO: 18961 - protein, 5 aa, Homo sapiens
PYVSA

SEQ ID NO: 18962 - protein, 5 aa, Homo sapiens
WERLE

SEQ ID NO: 18963 - protein, 5 aa, Homo sapiens
VSPAN

SEQ ID NO: 18964 - protein, 5 aa, Homo sapiens
CLFFL

SEQ ID NO: 18965 - protein, 5 aa, Homo sapiens
LYGLE

SEQ ID NO: 18966 - protein, 5 aa, Homo sapiens
ESKNH

SEQ ID NO: 18967 - protein, 5 aa, Homo sapiens
EEEQA

SEQ ID NO: 18968 - protein, 5 aa, Homo sapiens
VPDPF

SEQ ID NO: 18969 - protein, 5 aa, Homo sapiens
EPSPS

SEQ ID NO: 18970 - protein, 5 aa, Homo sapiens
LLEEL

SEQ ID NO: 18971 - protein, 5 aa, Homo sapiens
LLEEL

SEQ ID NO: 18972 - protein, 5 aa, Homo sapiens
LLEEL

SEQ ID NO: 18973 - protein, 5 aa, Homo sapiens
DEAKL

SEQ ID NO: 18974 - protein, 5 aa, Homo sapiens
LYELL

SEQ ID NO: 18975 - protein, 5 aa, Homo sapiens
FLDIP

SEQ ID NO: 18976 - protein, 5 aa, Homo sapiens
SRMEK

SEQ ID NO: 18977 - protein, 5 aa, Homo sapiens
AQMQL

SEQ ID NO: 18978 - protein, 5 aa, Homo sapiens
PWGQR

SEQ ID NO: 18979 - protein, 5 aa, Homo sapiens
LGFKI

SEQ ID NO: 18980 - protein, 5 aa, Homo sapiens
GQVSV

SEQ ID NO: 18981 - protein, 5 aa, Homo sapiens
SANIY

SEQ ID NO: 18982 - protein, 5 aa, Homo sapiens
RSPLA

SEQ ID NO: 18983 - protein, 5 aa, Homo sapiens
AVSKI

SEQ ID NO: 18984 - protein, 5 aa, Homo sapiens
IESWP

SEQ ID NO: 18985 - protein, 5 aa, Homo sapiens
CVYYW

SEQ ID NO: 18986 - protein, 5 aa, Homo sapiens
LKKKT

SEQ ID NO: 18987 - protein, 5 aa, Homo sapiens
PVSSL

SEQ ID NO: 18988 - protein, 5 aa, Homo sapiens
NADER

SEQ ID NO: 18989 - protein, 5 aa, Homo sapiens
LHKFY

SEQ ID NO: 18990 - protein, 5 aa, Homo sapiens
ILPIG

SEQ ID NO: 18991 - protein, 5 aa, Homo sapiens
FKEEL

SEQ ID NO: 18992 - protein, 5 aa, Homo sapiens
CPVIT

SEQ ID NO: 18993 - protein, 5 aa, Homo sapiens
LCAWV

SEQ ID NO: 18994 - protein, 5 aa, Homo sapiens
PYLRG

SEQ ID NO: 18995 - protein, 5 aa, Homo sapiens
GCGCR

SEQ ID NO: 18996 - protein, 5 aa, Homo sapiens
DQGVH

SEQ ID NO: 18997 - protein, 5 aa, Homo sapiens
DQGVH

SEQ ID NO: 18998 - protein, 5 aa, Homo sapiens
DAMRE

SEQ ID NO: 18999 - protein, 5 aa, Homo sapiens
DQGVH

SEQ ID NO: 19000 - protein, 5 aa, Homo sapiens
DQGVH

SEQ ID NO: 19001 - protein, 5 aa, Homo sapiens
DQGVH

SEQ ID NO: 19002 - protein, 5 aa, Homo sapiens
GKAWG

SEQ ID NO: 19003 - protein, 5 aa, Homo sapiens
TATIA

SEQ ID NO: 19004 - protein, 5 aa, Homo sapiens
HSGSK

SEQ ID NO: 19005 - protein, 5 aa, Homo sapiens
SSKLN

SEQ ID NO: 19006 - protein, 5 aa, Homo sapiens
KPDSQ

SEQ ID NO: 19007 - protein, 5 aa, Homo sapiens
EHHLS

SEQ ID NO: 19008 - protein, 5 aa, Homo sapiens
TFIIY

SEQ ID NO: 19009 - protein, 5 aa, Homo sapiens
KTSKC

SEQ ID NO: 19010 - protein, 5 aa, Homo sapiens
LQTVS

SEQ ID NO: 19011 - protein, 5 aa, Homo sapiens
LYKYV

SEQ ID NO: 19012 - protein, 5 aa, Homo sapiens
DQDED

SEQ ID NO: 19013 - protein, 5 aa, Homo sapiens
QVIKD

SEQ ID NO: 19014 - protein, 5 aa, Homo sapiens
CASLS

SEQ ID NO: 19015 - protein, 5 aa, Homo sapiens
PRLCH

SEQ ID NO: 19016 - protein, 5 aa, Homo sapiens
GWIIQ

SEQ ID NO: 19017 - protein, 5 aa, Homo sapiens
DSPSQ

SEQ ID NO: 19018 - protein, 5 aa, Homo sapiens
QLQTM

SEQ ID NO: 19019 - protein, 5 aa, Homo sapiens
RPDGR

SEQ ID NO: 19020 - protein, 5 aa, Homo sapiens
FVDIM

SEQ ID NO: 19021 - protein, 5 aa, Homo sapiens
EIQLS

SEQ ID NO: 19022 - protein, 5 aa, Homo sapiens
DLNEM

SEQ ID NO: 19023 - protein, 5 aa, Homo sapiens
IVFTI

SEQ ID NO: 19024 - protein, 5 aa, Homo sapiens
EKDEL

SEQ ID NO: 19025 - protein, 5 aa, Homo sapiens
SSILP

SEQ ID NO: 19026 - protein, 5 aa, Homo sapiens
RGHLV

SEQ ID NO: 19027 - protein, 5 aa, Homo sapiens
CCPFP

SEQ ID NO: 19028 - protein, 5 aa, Homo sapiens
ACHNI

SEQ ID NO: 19029 - protein, 5 aa, Homo sapiens
RVKET

SEQ ID NO: 19030 - protein, 5 aa, Homo sapiens
RSCIF

SEQ ID NO: 19031 - protein, 5 aa, Homo sapiens
CNFLT

SEQ ID NO: 19032 - protein, 5 aa, Homo sapiens
PFLKF

SEQ ID NO: 19033 - protein, 5 aa, Homo sapiens
ISGIP

SEQ ID NO: 19034 - protein, 5 aa, Homo sapiens
RLKTD

SEQ ID NO: 19035 - protein, 5 aa, Homo sapiens
VSNRL

SEQ ID NO: 19036 - protein, 5 aa, Homo sapiens
KKPKK

SEQ ID NO: 19037 - protein, 5 aa, Homo sapiens
FSQRG

SEQ ID NO: 19038 - protein, 5 aa, Homo sapiens
SNVNP

SEQ ID NO: 19039 - protein, 5 aa, Homo sapiens
APLWR

SEQ ID NO: 19040 - protein, 5 aa, Homo sapiens
EAKSD

SEQ ID NO: 19041 - protein, 5 aa, Homo sapiens
LCTKI

SEQ ID NO: 19042 - protein, 5 aa, Homo sapiens
SSHPM

SEQ ID NO: 19043 - protein, 5 aa, Homo sapiens
SSQPM

SEQ ID NO: 19044 - protein, 5 aa, Homo sapiens
HAPSA

SEQ ID NO: 19045 - protein, 5 aa, Homo sapiens
LLKIQ

SEQ ID NO: 19046 - protein, 5 aa, Homo sapiens
EKAGV

SEQ ID NO: 19047 - protein, 5 aa, Homo sapiens
ALACP

SEQ ID NO: 19048 - protein, 5 aa, Homo sapiens
LSLHH

SEQ ID NO: 19049 - protein, 5 aa, Homo sapiens
ALACL

SEQ ID NO: 19050 - protein, 5 aa, Homo sapiens
LSLHH

SEQ ID NO: 19051 - protein, 5 aa, Homo sapiens
ALACP

SEQ ID NO: 19052 - protein, 5 aa, Homo sapiens
LSLHH

SEQ ID NO: 19053 - protein, 5 aa, Homo sapiens
ALACP

SEQ ID NO: 19054 - protein, 5 aa, Homo sapiens
LSLHH

SEQ ID NO: 19055 - protein, 5 aa, Homo sapiens
HCSGH

SEQ ID NO: 19056 - protein, 5 aa, Homo sapiens
ALACP

SEQ ID NO: 19057 - protein, 5 aa, Homo sapiens
LSLHH

SEQ ID NO: 19058 - protein, 5 aa, Homo sapiens
KEMGN

SEQ ID NO: 19059 - protein, 5 aa, Homo sapiens
ALACP

SEQ ID NO: 19060 - protein, 5 aa, Homo sapiens
ALACP

SEQ ID NO: 19061 - protein, 5 aa, Homo sapiens
LSLHH

SEQ ID NO: 19062 - protein, 5 aa, Homo sapiens
SASLS

SEQ ID NO: 19063 - protein, 5 aa, Homo sapiens
ALACP

SEQ ID NO: 19064 - protein, 5 aa, Homo sapiens
LGLPS

SEQ ID NO: 19065 - protein, 5 aa, Homo sapiens
HRRGR

SEQ ID NO: 19066 - protein, 5 aa, Homo sapiens
SSQLQ

SEQ ID NO: 19067 - protein, 5 aa, Homo sapiens
NVENA

SEQ ID NO: 19068 - protein, 5 aa, Homo sapiens
GAETQ

SEQ ID NO: 19069 - protein, 5 aa, Homo sapiens
FSQPY

SEQ ID NO: 19070 - protein, 5 aa, Homo sapiens
MNSFV

SEQ ID NO: 19071 - protein, 5 aa, Homo sapiens
FGSHG

SEQ ID NO: 19072 - protein, 5 aa, Homo sapiens
GALFF

SEQ ID NO: 19073 - protein, 5 aa, Homo sapiens
LRLRA

SEQ ID NO: 19074 - protein, 5 aa, Homo sapiens
STLGG

SEQ ID NO: 19075 - protein, 5 aa, Homo sapiens
GKEVC

SEQ ID NO: 19076 - protein, 5 aa, Homo sapiens
PGGRR

SEQ ID NO: 19077 - protein, 5 aa, Homo sapiens
TDRMQ

SEQ ID NO: 19078 - protein, 5 aa, Homo sapiens
AISAP

SEQ ID NO: 19079 - protein, 5 aa, Homo sapiens
IKVDL

SEQ ID NO: 19080 - protein, 5 aa, Homo sapiens
NLTNA

SEQ ID NO: 19081 - protein, 5 aa, Homo sapiens
PMGPT

SEQ ID NO: 19082 - protein, 5 aa, Homo sapiens
RNFLI

SEQ ID NO: 19083 - protein, 5 aa, Homo sapiens
EAFCS

SEQ ID NO: 19084 - protein, 5 aa, Homo sapiens
CAVKS

SEQ ID NO: 19085 - protein, 5 aa, Homo sapiens
TTEDE

SEQ ID NO: 19086 - protein, 5 aa, Homo sapiens
IYEKV

SEQ ID NO: 19087 - protein, 5 aa, Homo sapiens
EGNNK

SEQ ID NO: 19088 - protein, 5 aa, Homo sapiens
WVKFW

SEQ ID NO: 19089 - protein, 5 aa, Homo sapiens
MSLDD

SEQ ID NO: 19090 - protein, 5 aa, Homo sapiens
YFAGA

SEQ ID NO: 19091 - protein, 5 aa, Homo sapiens
TMKQN

SEQ ID NO: 19092 - protein, 5 aa, Homo sapiens
FYTSA

SEQ ID NO: 19093 - protein, 5 aa, Homo sapiens
FLYRI

SEQ ID NO: 19094 - protein, 5 aa, Homo sapiens
TQESL

SEQ ID NO: 19095 - protein, 5 aa, Homo sapiens
RQIWI

SEQ ID NO: 19096 - protein, 5 aa, Homo sapiens
MLTGS

SEQ ID NO: 19097 - protein, 5 aa, Homo sapiens
LHFIK

SEQ ID NO: 19098 - protein, 5 aa, Homo sapiens
SQEEQ

SEQ ID NO: 19099 - protein, 5 aa, Homo sapiens
TIFTY

SEQ ID NO: 19100 - protein, 5 aa, Homo sapiens
ATSYI

SEQ ID NO: 19101 - protein, 5 aa, Homo sapiens
DEEGS

SEQ ID NO: 19102 - protein, 5 aa, Homo sapiens
DEDEK

SEQ ID NO: 19103 - protein, 5 aa, Homo sapiens
NRIQL

SEQ ID NO: 19104 - protein, 5 aa, Homo sapiens
FLTTD

SEQ ID NO: 19105 - protein, 5 aa, Homo sapiens
KTELV

SEQ ID NO: 19106 - protein, 5 aa, Homo sapiens
PASAS

SEQ ID NO: 19107 - protein, 5 aa, Homo sapiens
KSKDV

SEQ ID NO: 19108 - protein, 5 aa, Homo sapiens
YKAKQ

SEQ ID NO: 19109 - protein, 5 aa, Homo sapiens
TCQTQ

SEQ ID NO: 19110 - protein, 5 aa, Homo sapiens
WVGDA

SEQ ID NO: 19111 - protein, 5 aa, Homo sapiens
VCSLI

SEQ ID NO: 19112 - protein, 5 aa, Homo sapiens
GPSAP

SEQ ID NO: 19113 - protein, 5 aa, Homo sapiens
YRLWI

SEQ ID NO: 19114 - protein, 5 aa, Homo sapiens
GTVPS

SEQ ID NO: 19115 - protein, 5 aa, Homo sapiens
PKTGN

SEQ ID NO: 19116 - protein, 5 aa, Homo sapiens
FRMGT

SEQ ID NO: 19117 - protein, 5 aa, Homo sapiens
SADHD

SEQ ID NO: 19118 - protein, 5 aa, Homo sapiens
KPAKV

SEQ ID NO: 19119 - protein, 5 aa, Homo sapiens
SLKTC

SEQ ID NO: 19120 - protein, 5 aa, Homo sapiens
REGIP

SEQ ID NO: 19121 - protein, 5 aa, Homo sapiens
IEAAF

SEQ ID NO: 19122 - protein, 5 aa, Homo sapiens
LKPDD

SEQ ID NO: 19123 - protein, 5 aa, Homo sapiens
YFLME

SEQ ID NO: 19124 - protein, 5 aa, Homo sapiens
LHSIF

SEQ ID NO: 19125 - protein, 5 aa, Homo sapiens
PPASC

SEQ ID NO: 19126 - protein, 5 aa, Homo sapiens
QQADE

SEQ ID NO: 19127 - protein, 5 aa, Homo sapiens
PRVKD

SEQ ID NO: 19128 - protein, 5 aa, Homo sapiens
SHEPV

SEQ ID NO: 19129 - protein, 5 aa, Homo sapiens
TTTKH

SEQ ID NO: 19130 - protein, 5 aa, Homo sapiens
PSACL

SEQ ID NO: 19131 - protein, 5 aa, Homo sapiens
SPGTK

SEQ ID NO: 19132 - protein, 5 aa, Homo sapiens
YFFIK

SEQ ID NO: 19133 - protein, 5 aa, Homo sapiens
IGTER

SEQ ID NO: 19134 - protein, 5 aa, Homo sapiens
PNLVR

SEQ ID NO: 19135 - protein, 5 aa, Homo sapiens
SGAFV

SEQ ID NO: 19136 - protein, 5 aa, Homo sapiens
RAEPL

SEQ ID NO: 19137 - protein, 5 aa, Homo sapiens
TLAKI

SEQ ID NO: 19138 - protein, 5 aa, Homo sapiens
SQPRN

SEQ ID NO: 19139 - protein, 5 aa, Homo sapiens
GLLPT

SEQ ID NO: 19140 - protein, 5 aa, Homo sapiens
NETVS

SEQ ID NO: 19141 - protein, 5 aa, Homo sapiens
IIFLL

SEQ ID NO: 19142 - protein, 5 aa, Homo sapiens
SRAKK

SEQ ID NO: 19143 - protein, 5 aa, Homo sapiens
RRRGP

SEQ ID NO: 19144 - protein, 5 aa, Homo sapiens
TGISA

SEQ ID NO: 19145 - protein, 5 aa, Homo sapiens
IWCET

SEQ ID NO: 19146 - protein, 5 aa, Homo sapiens
MSLYC

SEQ ID NO: 19147 - protein, 5 aa, Homo sapiens
ENARP

SEQ ID NO: 19148 - protein, 5 aa, Homo sapiens
YLVEP

SEQ ID NO: 19149 - protein, 5 aa, Homo sapiens
EDQAA

SEQ ID NO: 19150 - protein, 5 aa, Homo sapiens
MLSSV

SEQ ID NO: 19151 - protein, 5 aa, Homo sapiens
ASTAF

SEQ ID NO: 19152 - protein, 5 aa, Homo sapiens
SAGLW

SEQ ID NO: 19153 - protein, 5 aa, Homo sapiens
DRASS

SEQ ID NO: 19154 - protein, 5 aa, Homo sapiens
VTAMG

SEQ ID NO: 19155 - protein, 5 aa, Homo sapiens
CWRYR

SEQ ID NO: 19156 - protein, 5 aa, Homo sapiens
RISNV

SEQ ID NO: 19157 - protein, 5 aa, Homo sapiens
FDKLN

SEQ ID NO: 19158 - protein, 5 aa, Homo sapiens
GQPRP

SEQ ID NO: 19159 - protein, 5 aa, Homo sapiens
CWRYR

SEQ ID NO: 19160 - protein, 5 aa, Homo sapiens
ALKYL

SEQ ID NO: 19161 - protein, 5 aa, Homo sapiens
TLASM

SEQ ID NO: 19162 - protein, 5 aa, Homo sapiens
RAHLS

SEQ ID NO: 19163 - protein, 5 aa, Homo sapiens
QITTV

SEQ ID NO: 19164 - protein, 5 aa, Homo sapiens
FYFLS

SEQ ID NO: 19165 - protein, 5 aa, Homo sapiens
VIIDI

SEQ ID NO: 19166 - protein, 5 aa, Homo sapiens
GVCPQ

SEQ ID NO: 19167 - protein, 5 aa, Homo sapiens
PCPTP

SEQ ID NO: 19168 - protein, 5 aa, Homo sapiens
YLCES

SEQ ID NO: 19169 - protein, 5 aa, Homo sapiens
SCRLW

SEQ ID NO: 19170 - protein, 5 aa, Homo sapiens
NRAHW

SEQ ID NO: 19171 - protein, 5 aa, Homo sapiens
TPATI

SEQ ID NO: 19172 - protein, 5 aa, Homo sapiens
PVLNL

SEQ ID NO: 19173 - protein, 5 aa, Homo sapiens
ALTVH

SEQ ID NO: 19174 - protein, 5 aa, Homo sapiens
EEKVE

SEQ ID NO: 19175 - protein, 5 aa, Homo sapiens
PGGRS

SEQ ID NO: 19176 - protein, 5 aa, Homo sapiens
LANEI

SEQ ID NO: 19177 - protein, 5 aa, Homo sapiens
LVQWI

SEQ ID NO: 19178 - protein, 5 aa, Homo sapiens
VKNIR

SEQ ID NO: 19179 - protein, 5 aa, Homo sapiens
WSVRV

SEQ ID NO: 19180 - protein, 5 aa, Homo sapiens
ENRLS

SEQ ID NO: 19181 - protein, 5 aa, Homo sapiens
ADRHL

SEQ ID NO: 19182 - protein, 5 aa, Homo sapiens
LISIR

SEQ ID NO: 19183 - protein, 5 aa, Homo sapiens
ILATL

SEQ ID NO: 19184 - protein, 5 aa, Homo sapiens
HLASE

SEQ ID NO: 19185 - protein, 5 aa, Homo sapiens
LYEVM

SEQ ID NO: 19186 - protein, 5 aa, Homo sapiens
LYEVM

SEQ ID NO: 19187 - protein, 5 aa, Homo sapiens
ICSAR

SEQ ID NO: 19188 - protein, 5 aa, Homo sapiens
FLIVG

SEQ ID NO: 19189 - protein, 5 aa, Homo sapiens
RRRWT

SEQ ID NO: 19190 - protein, 5 aa, Homo sapiens
NRNKQ

SEQ ID NO: 19191 - protein, 5 aa, Homo sapiens
KQANL

SEQ ID NO: 19192 - protein, 5 aa, Homo sapiens
SPPST

SEQ ID NO: 19193 - protein, 5 aa, Homo sapiens
DHALA

SEQ ID NO: 19194 - protein, 5 aa, Homo sapiens
EMATF

SEQ ID NO: 19195 - protein, 5 aa, Homo sapiens
SPPGT

SEQ ID NO: 19196 - protein, 5 aa, Homo sapiens
NSGQW

SEQ ID NO: 19197 - protein, 5 aa, Homo sapiens
RETDI

SEQ ID NO: 19198 - protein, 5 aa, Homo sapiens
SLPAI

SEQ ID NO: 19199 - protein, 5 aa, Homo sapiens
KIHPV

SEQ ID NO: 19200 - protein, 5 aa, Homo sapiens
EITAH

SEQ ID NO: 19201 - protein, 5 aa, Homo sapiens
VPAIS

SEQ ID NO: 19202 - protein, 5 aa, Homo sapiens
LLPAA

SEQ ID NO: 19203 - protein, 5 aa, Homo sapiens
DLEVN

SEQ ID NO: 19204 - protein, 5 aa, Homo sapiens
DWSIS

SEQ ID NO: 19205 - protein, 5 aa, Homo sapiens
LKSAK

SEQ ID NO: 19206 - protein, 5 aa, Homo sapiens
SMETT

SEQ ID NO: 19207 - protein, 5 aa, Homo sapiens
LRLCT

SEQ ID NO: 19208 - protein, 5 aa, Homo sapiens
QQGSL

SEQ ID NO: 19209 - protein, 5 aa, Homo sapiens
MVTAR

SEQ ID NO: 19210 - protein, 5 aa, Homo sapiens
RVAPQ

SEQ ID NO: 19211 - protein, 5 aa, Homo sapiens
RGDDQ

SEQ ID NO: 19212 - protein, 5 aa, Homo sapiens
NNEDF

SEQ ID NO: 19213 - protein, 5 aa, Homo sapiens
PKAEQ

SEQ ID NO: 19214 - protein, 5 aa, Homo sapiens
SVLAL

SEQ ID NO: 19215 - protein, 5 aa, Homo sapiens
GRRIT

SEQ ID NO: 19216 - protein, 5 aa, Homo sapiens
DLVLG

SEQ ID NO: 19217 - protein, 5 aa, Homo sapiens
PQRPA

SEQ ID NO: 19218 - protein, 5 aa, Homo sapiens
ALFAL

SEQ ID NO: 19219 - protein, 5 aa, Homo sapiens
IETHV

SEQ ID NO: 19220 - protein, 5 aa, Homo sapiens
WCICL

SEQ ID NO: 19221 - protein, 5 aa, Homo sapiens
ICEYH

SEQ ID NO: 19222 - protein, 5 aa, Homo sapiens
AKAIA

SEQ ID NO: 19223 - protein, 5 aa, Homo sapiens
GTTSS

SEQ ID NO: 19224 - protein, 5 aa, Homo sapiens
FDVQD

SEQ ID NO: 19225 - protein, 5 aa, Homo sapiens
LMTSD

SEQ ID NO: 19226 - protein, 5 aa, Homo sapiens
VDENC

SEQ ID NO: 19227 - protein, 5 aa, Homo sapiens
VTCEK

SEQ ID NO: 19228 - protein, 5 aa, Homo sapiens
SSVGL

SEQ ID NO: 19229 - protein, 5 aa, Homo sapiens
EESFV

SEQ ID NO: 19230 - protein, 5 aa, Homo sapiens
PFQLD

SEQ ID NO: 19231 - protein, 5 aa, Homo sapiens
SWVSG

SEQ ID NO: 19232 - protein, 5 aa, Homo sapiens
ISKLA

SEQ ID NO: 19233 - protein, 5 aa, Homo sapiens
TSTAL

SEQ ID NO: 19234 - protein, 5 aa, Homo sapiens
IKTMQ

SEQ ID NO: 19235 - protein, 5 aa, Homo sapiens
NAQME

SEQ ID NO: 19236 - protein, 5 aa, Homo sapiens
PSACL

SEQ ID NO: 19237 - protein, 5 aa, Homo sapiens
IGTER

SEQ ID NO: 19238 - protein, 5 aa, Homo sapiens
KHYPY

SEQ ID NO: 19239 - protein, 5 aa, Homo sapiens
IPAVP

SEQ ID NO: 19240 - protein, 5 aa, Homo sapiens
YLEKL

SEQ ID NO: 19241 - protein, 5 aa, Homo sapiens
PSFGS

SEQ ID NO: 19242 - protein, 5 aa, Homo sapiens
DIDDI

SEQ ID NO: 19243 - protein, 5 aa, Homo sapiens
IQRRV

SEQ ID NO: 19244 - protein, 5 aa, Homo sapiens
EKHRK

SEQ ID NO: 19245 - protein, 5 aa, Homo sapiens
EWHYL

SEQ ID NO: 19246 - protein, 5 aa, Homo sapiens
KVLGL

SEQ ID NO: 19247 - protein, 5 aa, Homo sapiens
VGGGL

SEQ ID NO: 19248 - protein, 5 aa, Homo sapiens
SARSL

SEQ ID NO: 19249 - protein, 5 aa, Homo sapiens
NETSL

SEQ ID NO: 19250 - protein, 5 aa, Homo sapiens
LPNKA

SEQ ID NO: 19251 - protein, 5 aa, Homo sapiens
EKKST

SEQ ID NO: 19252 - protein, 5 aa, Homo sapiens
SGRVE

SEQ ID NO: 19253 - protein, 5 aa, Homo sapiens
RVGSC

SEQ ID NO: 19254 - protein, 5 aa, Homo sapiens
LNTFC

SEQ ID NO: 19255 - protein, 5 aa, Homo sapiens
IFWKI

SEQ ID NO: 19256 - protein, 5 aa, Homo sapiens
MLRCE

SEQ ID NO: 19257 - protein, 5 aa, Homo sapiens
RPLPV

SEQ ID NO: 19258 - protein, 5 aa, Homo sapiens
LAQTV

SEQ ID NO: 19259 - protein, 5 aa, Homo sapiens
FRLKK

SEQ ID NO: 19260 - protein, 5 aa, Homo sapiens
KRAAN

SEQ ID NO: 19261 - protein, 5 aa, Homo sapiens
SLNKQ

SEQ ID NO: 19262 - protein, 5 aa, Homo sapiens
FSLNK

SEQ ID NO: 19263 - protein, 5 aa, Homo sapiens
FYANQ

SEQ ID NO: 19264 - protein, 5 aa, Homo sapiens
FFTST

SEQ ID NO: 19265 - protein, 5 aa, Homo sapiens
SKHSF

SEQ ID NO: 19266 - protein, 5 aa, Homo sapiens
GQRQL

SEQ ID NO: 19267 - protein, 5 aa, Homo sapiens
SKTLN

SEQ ID NO: 19268 - protein, 5 aa, Homo sapiens
VTTRL

SEQ ID NO: 19269 - protein, 5 aa, Homo sapiens
TRKFC

SEQ ID NO: 19270 - protein, 5 aa, Homo sapiens
SSSRI

SEQ ID NO: 19271 - protein, 5 aa, Homo sapiens
RDHPG

SEQ ID NO: 19272 - protein, 5 aa, Homo sapiens
TCLTY

SEQ ID NO: 19273 - protein, 5 aa, Homo sapiens
YTNSH

SEQ ID NO: 19274 - protein, 5 aa, Homo sapiens
APGMN

SEQ ID NO: 19275 - protein, 5 aa, Homo sapiens
KDGKC

SEQ ID NO: 19276 - protein, 5 aa, Homo sapiens
MQLRS

SEQ ID NO: 19277 - protein, 5 aa, Homo sapiens
IGTPS

SEQ ID NO: 19278 - protein, 5 aa, Homo sapiens
CQLLN

SEQ ID NO: 19279 - protein, 5 aa, Homo sapiens
LGNKS

SEQ ID NO: 19280 - protein, 5 aa, Homo sapiens
RFLGL

SEQ ID NO: 19281 - protein, 5 aa, Homo sapiens
EGRSQ

SEQ ID NO: 19282 - protein, 5 aa, Homo sapiens
LGHQS

SEQ ID NO: 19283 - protein, 5 aa, Homo sapiens
KLWKP

SEQ ID NO: 19284 - protein, 5 aa, Homo sapiens
ERKQR

SEQ ID NO: 19285 - protein, 5 aa, Homo sapiens
AKDEL

SEQ ID NO: 19286 - protein, 5 aa, Homo sapiens
AVHHE

SEQ ID NO: 19287 - protein, 5 aa, Homo sapiens
TEVTV

SEQ ID NO: 19288 - protein, 5 aa, Homo sapiens
SRFLL

SEQ ID NO: 19289 - protein, 5 aa, Homo sapiens
RAFHC

SEQ ID NO: 19290 - protein, 5 aa, Homo sapiens
KFSPY

SEQ ID NO: 19291 - protein, 5 aa, Homo sapiens
SSDSD

SEQ ID NO: 19292 - protein, 5 aa, Homo sapiens
LSPAE

SEQ ID NO: 19293 - protein, 5 aa, Homo sapiens
GPVCC

SEQ ID NO: 19294 - protein, 5 aa, Homo sapiens
DPALF

SEQ ID NO: 19295 - protein, 5 aa, Homo sapiens
NVKDN

SEQ ID NO: 19296 - protein, 5 aa, Homo sapiens
QCQTS

SEQ ID NO: 19297 - protein, 5 aa, Homo sapiens
SSIGH

SEQ ID NO: 19298 - protein, 5 aa, Homo sapiens
RQRSK

SEQ ID NO: 19299 - protein, 5 aa, Homo sapiens
RPASP

SEQ ID NO: 19300 - protein, 5 aa, Homo sapiens
EETDL

SEQ ID NO: 19301 - protein, 5 aa, Homo sapiens
YTAPC

SEQ ID NO: 19302 - protein, 5 aa, Homo sapiens
CSCCA

SEQ ID NO: 19303 - protein, 5 aa, Homo sapiens
CSCCA

SEQ ID NO: 19304 - protein, 5 aa, Homo sapiens
CSCCA

SEQ ID NO: 19305 - protein, 5 aa, Homo sapiens
KHWTQ

SEQ ID NO: 19306 - protein, 5 aa, Homo sapiens
ARGKN

SEQ ID NO: 19307 - protein, 5 aa, Homo sapiens
ISSVS

SEQ ID NO: 19308 - protein, 5 aa, Homo sapiens
GSQKL

SEQ ID NO: 19309 - protein, 5 aa, Homo sapiens
RNCIP

SEQ ID NO: 19310 - protein, 5 aa, Homo sapiens
DLKKQ

SEQ ID NO: 19311 - protein, 5 aa, Homo sapiens
PVWPA

SEQ ID NO: 19312 - protein, 5 aa, Homo sapiens
SLLLY

SEQ ID NO: 19313 - protein, 5 aa, Homo sapiens
PDQHH

SEQ ID NO: 19314 - protein, 5 aa, Homo sapiens
LGQDL

SEQ ID NO: 19315 - protein, 5 aa, Homo sapiens
THLKS

SEQ ID NO: 19316 - protein, 5 aa, Homo sapiens
FIEQM

SEQ ID NO: 19317 - protein, 5 aa, Homo sapiens
LTWWL

SEQ ID NO: 19318 - protein, 5 aa, Homo sapiens
QFWAY

SEQ ID NO: 19319 - protein, 5 aa, Homo sapiens
AEMSK

SEQ ID NO: 19320 - protein, 5 aa, Homo sapiens
EYIED

SEQ ID NO: 19321 - protein, 5 aa, Homo sapiens
LAEQV

SEQ ID NO: 19322 - protein, 5 aa, Homo sapiens
GKWYP

SEQ ID NO: 19323 - protein, 5 aa, Homo sapiens
IHACS

SEQ ID NO: 19324 - protein, 5 aa, Homo sapiens
QSSSN

SEQ ID NO: 19325 - protein, 5 aa, Homo sapiens
TQPWS

SEQ ID NO: 19326 - protein, 5 aa, Homo sapiens
SLWGF

SEQ ID NO: 19327 - protein, 5 aa, Homo sapiens
RNDLD

SEQ ID NO: 19328 - protein, 5 aa, Homo sapiens
SLEKL

SEQ ID NO: 19329 - protein, 5 aa, Homo sapiens
PEYYC

SEQ ID NO: 19330 - protein, 5 aa, Homo sapiens
SQYNV

SEQ ID NO: 19331 - protein, 5 aa, Homo sapiens
DDLEA

SEQ ID NO: 19332 - protein, 5 aa, Homo sapiens
LGKTD

SEQ ID NO: 19333 - protein, 5 aa, Homo sapiens
PPGPE

SEQ ID NO: 19334 - protein, 5 aa, Homo sapiens
GCQMQ

SEQ ID NO: 19335 - protein, 5 aa, Homo sapiens
EENQY

SEQ ID NO: 19336 - protein, 5 aa, Homo sapiens
FKTDH

SEQ ID NO: 19337 - protein, 5 aa, Homo sapiens
AVSLF

SEQ ID NO: 19338 - protein, 5 aa, Homo sapiens
SSKGA

SEQ ID NO: 19339 - protein, 5 aa, Homo sapiens
DIEIV

SEQ ID NO: 19340 - protein, 5 aa, Homo sapiens
SRRTI

SEQ ID NO: 19341 - protein, 5 aa, Homo sapiens
CTAAG

SEQ ID NO: 19342 - protein, 5 aa, Homo sapiens
CPPSS

SEQ ID NO: 19343 - protein, 5 aa, Homo sapiens
CSHHL

SEQ ID NO: 19344 - protein, 5 aa, Homo sapiens
AVCHR

SEQ ID NO: 19345 - protein, 5 aa, Homo sapiens
FVALG

SEQ ID NO: 19346 - protein, 5 aa, Homo sapiens
KSYKH

SEQ ID NO: 19347 - protein, 5 aa, Homo sapiens
RCLVM

SEQ ID NO: 19348 - protein, 5 aa, Homo sapiens
VSKCA

SEQ ID NO: 19349 - protein, 5 aa, Homo sapiens
CLLPH

SEQ ID NO: 19350 - protein, 5 aa, Homo sapiens
AVWAP

SEQ ID NO: 19351 - protein, 5 aa, Homo sapiens
CSEER

SEQ ID NO: 19352 - protein, 5 aa, Homo sapiens
ALTGK

SEQ ID NO: 19353 - protein, 5 aa, Homo sapiens
LFLVF

SEQ ID NO: 19354 - protein, 5 aa, Homo sapiens
IAKLS

SEQ ID NO: 19355 - protein, 5 aa, Homo sapiens
VLMTF

SEQ ID NO: 19356 - protein, 5 aa, Homo sapiens
IKSSS

SEQ ID NO: 19357 - protein, 5 aa, Homo sapiens
CESAF

SEQ ID NO: 19358 - protein, 5 aa, Homo sapiens
RQAPN

SEQ ID NO: 19359 - protein, 5 aa, Homo sapiens
NPRAV

SEQ ID NO: 19360 - protein, 5 aa, Homo sapiens
SCRKC

SEQ ID NO: 19361 - protein, 5 aa, Homo sapiens
PSTVR

SEQ ID NO: 19362 - protein, 5 aa, Homo sapiens
QHPSL

SEQ ID NO: 19363 - protein, 5 aa, Homo sapiens
VVFHL

SEQ ID NO: 19364 - protein, 5 aa, Homo sapiens
ESVTR

SEQ ID NO: 19365 - protein, 5 aa, Homo sapiens
TDPST

SEQ ID NO: 19366 - protein, 5 aa, Homo sapiens
PPLLP

SEQ ID NO: 19367 - protein, 5 aa, Homo sapiens
KCFEN

SEQ ID NO: 19368 - protein, 5 aa, Homo sapiens
LKAGS

SEQ ID NO: 19369 - protein, 5 aa, Homo sapiens
SNSKH

SEQ ID NO: 19370 - protein, 5 aa, Homo sapiens
LCEEN

SEQ ID NO: 19371 - protein, 5 aa, Homo sapiens
AEHRP

SEQ ID NO: 19372 - protein, 5 aa, Homo sapiens
SQSST

SEQ ID NO: 19373 - protein, 5 aa, Homo sapiens
STSGN

SEQ ID NO: 19374 - protein, 5 aa, Homo sapiens
VLFIC

SEQ ID NO: 19375 - protein, 5 aa, Homo sapiens
LITCV

SEQ ID NO: 19376 - protein, 5 aa, Homo sapiens
EGMMF

SEQ ID NO: 19377 - protein, 5 aa, Homo sapiens
TLAQS

SEQ ID NO: 19378 - protein, 5 aa, Homo sapiens
RNSKH

SEQ ID NO: 19379 - protein, 5 aa, Homo sapiens
LVFKD

SEQ ID NO: 19380 - protein, 5 aa, Homo sapiens
ILNLL

SEQ ID NO: 19381 - protein, 5 aa, Homo sapiens
EGQGS

SEQ ID NO: 19382 - protein, 5 aa, Homo sapiens
IKKPA

SEQ ID NO: 19383 - protein, 5 aa, Homo sapiens
ISSCC

SEQ ID NO: 19384 - protein, 5 aa, Homo sapiens
HSAMT

SEQ ID NO: 19385 - protein, 5 aa, Homo sapiens
MFSLH

SEQ ID NO: 19386 - protein, 5 aa, Homo sapiens
FRLRK

SEQ ID NO: 19387 - protein, 5 aa, Homo sapiens
RRSYK

SEQ ID NO: 19388 - protein, 5 aa, Homo sapiens
QKSSC

SEQ ID NO: 19389 - protein, 5 aa, Homo sapiens
SLTSP

SEQ ID NO: 19390 - protein, 5 aa, Homo sapiens
GSLAA

SEQ ID NO: 19391 - protein, 5 aa, Homo sapiens
YSLGV

SEQ ID NO: 19392 - protein, 5 aa, Homo sapiens
RLRTR

SEQ ID NO: 19393 - protein, 5 aa, Homo sapiens
RKSKL

SEQ ID NO: 19394 - protein, 5 aa, Homo sapiens
IESVD

SEQ ID NO: 19395 - protein, 5 aa, Homo sapiens
CHHGY

SEQ ID NO: 19396 - protein, 5 aa, Homo sapiens
SPAGR

SEQ ID NO: 19397 - protein, 5 aa, Homo sapiens
KWRLQ

SEQ ID NO: 19398 - protein, 5 aa, Homo sapiens
RGPGK

SEQ ID NO: 19399 - protein, 5 aa, Homo sapiens
GSGPG

SEQ ID NO: 19400 - protein, 5 aa, Homo sapiens
SLGLG

SEQ ID NO: 19401 - protein, 5 aa, Homo sapiens
NSVSI

SEQ ID NO: 19402 - protein, 5 aa, Homo sapiens
TKKYI

SEQ ID NO: 19403 - protein, 5 aa, Homo sapiens
LQEEN

SEQ ID NO: 19404 - protein, 5 aa, Homo sapiens
GSGPG

SEQ ID NO: 19405 - protein, 5 aa, Homo sapiens
PASPA

SEQ ID NO: 19406 - protein, 5 aa, Homo sapiens
HCVRF

SEQ ID NO: 19407 - protein, 5 aa, Homo sapiens
SKIYV

SEQ ID NO: 19408 - protein, 5 aa, Homo sapiens
IPAAL

SEQ ID NO: 19409 - protein, 5 aa, Homo sapiens
DCGPS

SEQ ID NO: 19410 - protein, 5 aa, Homo sapiens
KAKTS

SEQ ID NO: 19411 - protein, 5 aa, Homo sapiens
LLPRH

SEQ ID NO: 19412 - protein, 5 aa, Homo sapiens
MTMSV

SEQ ID NO: 19413 - protein, 5 aa, Homo sapiens
NSVSI

SEQ ID NO: 19414 - protein, 5 aa, Homo sapiens
DLLSA

SEQ ID NO: 19415 - protein, 5 aa, Homo sapiens
IYGED

SEQ ID NO: 19416 - protein, 5 aa, Homo sapiens
SKRRK

SEQ ID NO: 19417 - protein, 5 aa, Homo sapiens
PTQTH

SEQ ID NO: 19418 - protein, 5 aa, Homo sapiens
LKIQN

SEQ ID NO: 19419 - protein, 5 aa, Homo sapiens
KKISQ

SEQ ID NO: 19420 - protein, 5 aa, Homo sapiens
LKSKE

SEQ ID NO: 19421 - protein, 5 aa, Homo sapiens
LRSKE

SEQ ID NO: 19422 - protein, 5 aa, Homo sapiens
LRRKE

SEQ ID NO: 19423 - protein, 5 aa, Homo sapiens
LRRKE

SEQ ID NO: 19424 - protein, 5 aa, Homo sapiens
HKSQA

SEQ ID NO: 19425 - protein, 5 aa, Homo sapiens
LRRKE

SEQ ID NO: 19426 - protein, 5 aa, Homo sapiens
LRRKD

SEQ ID NO: 19427 - protein, 5 aa, Homo sapiens
LRRKD

SEQ ID NO: 19428 - protein, 5 aa, Homo sapiens
LRRKD

SEQ ID NO: 19429 - protein, 5 aa, Homo sapiens
PHSRA

SEQ ID NO: 19430 - protein, 5 aa, Homo sapiens
LRRKD

SEQ ID NO: 19431 - protein, 5 aa, Homo sapiens
GQSRA

SEQ ID NO: 19432 - protein, 5 aa, Homo sapiens
LRRKE

SEQ ID NO: 19433 - protein, 5 aa, Homo sapiens
DLGSS

SEQ ID NO: 19434 - protein, 5 aa, Homo sapiens
PQPPE

SEQ ID NO: 19435 - protein, 5 aa, Homo sapiens
PEASV

SEQ ID NO: 19436 - protein, 5 aa, Homo sapiens
GYLRN

SEQ ID NO: 19437 - protein, 5 aa, Homo sapiens
YRAQS

SEQ ID NO: 19438 - protein, 5 aa, Homo sapiens
FKGPL

SEQ ID NO: 19439 - protein, 5 aa, Homo sapiens
RTHIP

SEQ ID NO: 19440 - protein, 5 aa, Homo sapiens
QSFQG

SEQ ID NO: 19441 - protein, 5 aa, Homo sapiens
QSFQG

SEQ ID NO: 19442 - protein, 5 aa, Homo sapiens
SGTSL

SEQ ID NO: 19443 - protein, 5 aa, Homo sapiens
ASSLR

SEQ ID NO: 19444 - protein, 5 aa, Homo sapiens
GGVWR

SEQ ID NO: 19445 - protein, 5 aa, Homo sapiens
HPRLF

SEQ ID NO: 19446 - protein, 5 aa, Homo sapiens
RWYIH

SEQ ID NO: 19447 - protein, 5 aa, Homo sapiens
KYTIR

SEQ ID NO: 19448 - protein, 5 aa, Homo sapiens
GPTQI

SEQ ID NO: 19449 - protein, 5 aa, Homo sapiens
LDDHQ

SEQ ID NO: 19450 - protein, 5 aa, Homo sapiens
TDIWD

SEQ ID NO: 19451 - protein, 5 aa, Homo sapiens
AKAIS

SEQ ID NO: 19452 - protein, 5 aa, Homo sapiens
CPGCS

SEQ ID NO: 19453 - protein, 5 aa, Homo sapiens
HERYV

SEQ ID NO: 19454 - protein, 5 aa, Homo sapiens
FKKAY

SEQ ID NO: 19455 - protein, 5 aa, Homo sapiens
TSPVV

SEQ ID NO: 19456 - protein, 5 aa, Homo sapiens
MEEVD

SEQ ID NO: 19457 - protein, 5 aa, Homo sapiens
FPEKF

SEQ ID NO: 19458 - protein, 5 aa, Homo sapiens
GEKAQ

SEQ ID NO: 19459 - protein, 5 aa, Homo sapiens
ELEHA

SEQ ID NO: 19460 - protein, 5 aa, Homo sapiens
GSDKL

SEQ ID NO: 19461 - protein, 5 aa, Homo sapiens
QRRDS

SEQ ID NO: 19462 - protein, 5 aa, Homo sapiens
LVQAP

SEQ ID NO: 19463 - protein, 5 aa, Homo sapiens
MLAQE

SEQ ID NO: 19464 - protein, 5 aa, Homo sapiens
LSAAW

SEQ ID NO: 19465 - protein, 5 aa, Homo sapiens
TSGTS

SEQ ID NO: 19466 - protein, 5 aa, Homo sapiens
WRLQA

SEQ ID NO: 19467 - protein, 5 aa, Homo sapiens
RLTPL

SEQ ID NO: 19468 - protein, 5 aa, Homo sapiens
GEDEA

SEQ ID NO: 19469 - protein, 5 aa, Homo sapiens
CLYLH

SEQ ID NO: 19470 - protein, 5 aa, Homo sapiens
ICIDD

SEQ ID NO: 19471 - protein, 5 aa, Homo sapiens
RKAKT

SEQ ID NO: 19472 - protein, 5 aa, Homo sapiens
HGTGK

SEQ ID NO: 19473 - protein, 5 aa, Homo sapiens
KDQTH

SEQ ID NO: 19474 - protein, 5 aa, Homo sapiens
VFTKK

SEQ ID NO: 19475 - protein, 5 aa, Homo sapiens
CQWKI

SEQ ID NO: 19476 - protein, 5 aa, Homo sapiens
FSFFN

SEQ ID NO: 19477 - protein, 5 aa, Homo sapiens
CQRKI

SEQ ID NO: 19478 - protein, 5 aa, Homo sapiens
LYVHI

SEQ ID NO: 19479 - protein, 5 aa, Homo sapiens
VKLEA

SEQ ID NO: 19480 - protein, 5 aa, Homo sapiens
RGRWD

SEQ ID NO: 19481 - protein, 5 aa, Homo sapiens
EDFLQ

SEQ ID NO: 19482 - protein, 5 aa, Homo sapiens
CGNIP

SEQ ID NO: 19483 - protein, 5 aa, Homo sapiens
LLLTK

SEQ ID NO: 19484 - protein, 5 aa, Homo sapiens
CGKVF

SEQ ID NO: 19485 - protein, 5 aa, Homo sapiens
QSFIL

SEQ ID NO: 19486 - protein, 5 aa, Homo sapiens
HCLKL

SEQ ID NO: 19487 - protein, 5 aa, Homo sapiens
ALLLL

SEQ ID NO: 19488 - protein, 5 aa, Homo sapiens
ESSQK

SEQ ID NO: 19489 - protein, 5 aa, Homo sapiens
RDLKT

SEQ ID NO: 19490 - protein, 5 aa, Homo sapiens
RAHLS

SEQ ID NO: 19491 - protein, 5 aa, Homo sapiens
WRKTL

SEQ ID NO: 19492 - protein, 5 aa, Homo sapiens
TEAVG

SEQ ID NO: 19493 - protein, 5 aa, Homo sapiens
AAGRR

SEQ ID NO: 19494 - protein, 5 aa, Homo sapiens
WKETL

SEQ ID NO: 19495 - protein, 5 aa, Homo sapiens
TEAVG

SEQ ID NO: 19496 - protein, 5 aa, Homo sapiens
RAHLS

SEQ ID NO: 19497 - protein, 5 aa, Homo sapiens
SKIGN

SEQ ID NO: 19498 - protein, 5 aa, Homo sapiens
RAHLS

SEQ ID NO: 19499 - protein, 5 aa, Homo sapiens
SNLGS

SEQ ID NO: 19500 - protein, 5 aa, Homo sapiens
IGRKK

SEQ ID NO: 19501 - protein, 5 aa, Homo sapiens
GAPLI

SEQ ID NO: 19502 - protein, 5 aa, Homo sapiens
QAQKK

SEQ ID NO: 19503 - protein, 5 aa, Homo sapiens
TDASH

SEQ ID NO: 19504 - protein, 5 aa, Homo sapiens
ISETR

SEQ ID NO: 19505 - protein, 5 aa, Homo sapiens
SVSPS

SEQ ID NO: 19506 - protein, 5 aa, Homo sapiens
KLAGK

SEQ ID NO: 19507 - protein, 5 aa, Homo sapiens
QVFYE

SEQ ID NO: 19508 - protein, 5 aa, Homo sapiens
SRFWR

SEQ ID NO: 19509 - protein, 5 aa, Homo sapiens
FLLYQ

SEQ ID NO: 19510 - protein, 5 aa, Homo sapiens
NKKKK

SEQ ID NO: 19511 - protein, 5 aa, Homo sapiens
ATCES

SEQ ID NO: 19512 - protein, 5 aa, Homo sapiens
VVSKM

SEQ ID NO: 19513 - protein, 5 aa, Homo sapiens
PNQFI

SEQ ID NO: 19514 - protein, 5 aa, Homo sapiens
VEPCT

SEQ ID NO: 19515 - protein, 5 aa, Homo sapiens
FLLHL

SEQ ID NO: 19516 - protein, 5 aa, Homo sapiens
RSPTF

SEQ ID NO: 19517 - protein, 5 aa, Homo sapiens
LLLIP

SEQ ID NO: 19518 - protein, 5 aa, Homo sapiens
YLLYS

SEQ ID NO: 19519 - protein, 5 aa, Homo sapiens
KPILF

SEQ ID NO: 19520 - protein, 5 aa, Homo sapiens
CQAQD

SEQ ID NO: 19521 - protein, 5 aa, Homo sapiens
WSPQL

SEQ ID NO: 19522 - protein, 5 aa, Homo sapiens
ATTGI

SEQ ID NO: 19523 - protein, 5 aa, Homo sapiens
AQGLE

SEQ ID NO: 19524 - protein, 5 aa, Homo sapiens
SDLTR

SEQ ID NO: 19525 - protein, 5 aa, Homo sapiens
LPSES

SEQ ID NO: 19526 - protein, 5 aa, Homo sapiens
FSEEY

SEQ ID NO: 19527 - protein, 5 aa, Homo sapiens
PPRRF

SEQ ID NO: 19528 - protein, 5 aa, Homo sapiens
TSTYS

SEQ ID NO: 19529 - protein, 5 aa, Homo sapiens
IPLKF

SEQ ID NO: 19530 - protein, 5 aa, Homo sapiens
NGSFQ

SEQ ID NO: 19531 - protein, 5 aa, Homo sapiens
SLLMR

SEQ ID NO: 19532 - protein, 5 aa, Homo sapiens
LEVLA

SEQ ID NO: 19533 - protein, 5 aa, Homo sapiens
INPKV

SEQ ID NO: 19534 - protein, 5 aa, Homo sapiens
YSDEY

SEQ ID NO: 19535 - protein, 5 aa, Homo sapiens
TCGKA

SEQ ID NO: 19536 - protein, 5 aa, Homo sapiens
SSDEF

SEQ ID NO: 19537 - protein, 5 aa, Homo sapiens
NTTVV

SEQ ID NO: 19538 - protein, 5 aa, Homo sapiens
AAGGK

SEQ ID NO: 19539 - protein, 5 aa, Homo sapiens
KNEAN

SEQ ID NO: 19540 - protein, 5 aa, Homo sapiens
TACVC

SEQ ID NO: 19541 - protein, 5 aa, Homo sapiens
EDDRD

SEQ ID NO: 19542 - protein, 5 aa, Homo sapiens
KFDLS

SEQ ID NO: 19543 - protein, 5 aa, Homo sapiens
SPPKV

SEQ ID NO: 19544 - protein, 5 aa, Homo sapiens
AASPW

SEQ ID NO: 19545 - protein, 5 aa, Homo sapiens
LSVDD

SEQ ID NO: 19546 - protein, 5 aa, Homo sapiens
RGQKD

SEQ ID NO: 19547 - protein, 5 aa, Homo sapiens
VALPH

SEQ ID NO: 19548 - protein, 5 aa, Homo sapiens
VPLAL

SEQ ID NO: 19549 - protein, 5 aa, Homo sapiens
EFGSA

SEQ ID NO: 19550 - protein, 5 aa, Homo sapiens
IKGEK

SEQ ID NO: 19551 - protein, 5 aa, Homo sapiens
PWKCV

SEQ ID NO: 19552 - protein, 5 aa, Homo sapiens
QAGES

SEQ ID NO: 19553 - protein, 5 aa, Homo sapiens
SLLAE

SEQ ID NO: 19554 - protein, 5 aa, Homo sapiens
QFSND

SEQ ID NO: 19555 - protein, 5 aa, Homo sapiens
MKDIR

SEQ ID NO: 19556 - protein, 5 aa, Homo sapiens
KKFYQ

SEQ ID NO: 19557 - protein, 5 aa, Homo sapiens
FKETV

SEQ ID NO: 19558 - protein, 5 aa, Homo sapiens
FTSVD

SEQ ID NO: 19559 - protein, 5 aa, Homo sapiens
DGTEV

SEQ ID NO: 19560 - protein, 5 aa, Homo sapiens
CCVIL

SEQ ID NO: 19561 - protein, 5 aa, Homo sapiens
WRPKI

SEQ ID NO: 19562 - protein, 5 aa, Homo sapiens
AACVD

SEQ ID NO: 19563 - protein, 5 aa, Homo sapiens
AGDAK

SEQ ID NO: 19564 - protein, 5 aa, Homo sapiens
AGRPV

SEQ ID NO: 19565 - protein, 5 aa, Homo sapiens
RFSSP

SEQ ID NO: 19566 - protein, 5 aa, Homo sapiens
GVDLL

SEQ ID NO: 19567 - protein, 5 aa, Homo sapiens
TQIGL

SEQ ID NO: 19568 - protein, 5 aa, Homo sapiens
YKSWS

SEQ ID NO: 19569 - protein, 5 aa, Homo sapiens
SHSLN

SEQ ID NO: 19570 - protein, 5 aa, Homo sapiens
CQGPL

SEQ ID NO: 19571 - protein, 5 aa, Homo sapiens
TARAR

SEQ ID NO: 19572 - protein, 5 aa, Homo sapiens
REEVD

SEQ ID NO: 19573 - protein, 5 aa, Homo sapiens
FMTNQ

SEQ ID NO: 19574 - protein, 5 aa, Homo sapiens
PCLCL

SEQ ID NO: 19575 - protein, 5 aa, Homo sapiens
VLAAL

SEQ ID NO: 19576 - protein, 5 aa, Homo sapiens
LGLLA

SEQ ID NO: 19577 - protein, 5 aa, Homo sapiens
AGRPV

SEQ ID NO: 19578 - protein, 5 aa, Homo sapiens
STLDN

SEQ ID NO: 19579 - protein, 5 aa, Homo sapiens
QDKVN

SEQ ID NO: 19580 - protein, 5 aa, Homo sapiens
RFSSP

SEQ ID NO: 19581 - protein, 5 aa, Homo sapiens
SHSLN

SEQ ID NO: 19582 - protein, 5 aa, Homo sapiens
SFYIL

SEQ ID NO: 19583 - protein, 5 aa, Homo sapiens
FCCWI

SEQ ID NO: 19584 - protein, 5 aa, Homo sapiens
LDQCK

SEQ ID NO: 19585 - protein, 5 aa, Homo sapiens
FSDEY

SEQ ID NO: 19586 - protein, 5 aa, Homo sapiens
AGRPV

SEQ ID NO: 19587 - protein, 5 aa, Homo sapiens
PGAVS

SEQ ID NO: 19588 - protein, 5 aa, Homo sapiens
NPLLE

SEQ ID NO: 19589 - protein, 5 aa, Homo sapiens
RAHLS

SEQ ID NO: 19590 - protein, 5 aa, Homo sapiens
KQRRC

SEQ ID NO: 19591 - protein, 5 aa, Homo sapiens
ESDGT

SEQ ID NO: 19592 - protein, 5 aa, Homo sapiens
FHLLG

SEQ ID NO: 19593 - protein, 5 aa, Homo sapiens
YLRAS

SEQ ID NO: 19594 - protein, 5 aa, Homo sapiens
QQMIA

SEQ ID NO: 19595 - protein, 5 aa, Homo sapiens
NQSAK

SEQ ID NO: 19596 - protein, 5 aa, Homo sapiens
PGTFN

SEQ ID NO: 19597 - protein, 5 aa, Homo sapiens
SDRAC

SEQ ID NO: 19598 - protein, 5 aa, Homo sapiens
TNPNA

SEQ ID NO: 19599 - protein, 5 aa, Homo sapiens
TFMYS

SEQ ID NO: 19600 - protein, 5 aa, Homo sapiens
FLKFF

SEQ ID NO: 19601 - protein, 5 aa, Homo sapiens
KDHNS

SEQ ID NO: 19602 - protein, 5 aa, Homo sapiens
QVYAG

SEQ ID NO: 19603 - protein, 5 aa, Homo sapiens
SIMFN

SEQ ID NO: 19604 - protein, 5 aa, Homo sapiens
GFPSQ

SEQ ID NO: 19605 - protein, 5 aa, Homo sapiens
VLCPP

SEQ ID NO: 19606 - protein, 5 aa, Homo sapiens
KLGLL

SEQ ID NO: 19607 - protein, 5 aa, Homo sapiens
QTKGS

SEQ ID NO: 19608 - protein, 5 aa, Homo sapiens
LYDDS

SEQ ID NO: 19609 - protein, 5 aa, Homo sapiens
VHAIA

SEQ ID NO: 19610 - protein, 5 aa, Homo sapiens
TDSIE

SEQ ID NO: 19611 - protein, 5 aa, Homo sapiens
KPSSD

SEQ ID NO: 19612 - protein, 5 aa, Homo sapiens
SSRLQ

SEQ ID NO: 19613 - protein, 5 aa, Homo sapiens
PADDV

SEQ ID NO: 19614 - protein, 5 aa, Homo sapiens
WGPGV

SEQ ID NO: 19615 - protein, 5 aa, Homo sapiens
LQGRL

SEQ ID NO: 19616 - protein, 5 aa, Homo sapiens
SPAFW

SEQ ID NO: 19617 - protein, 5 aa, Homo sapiens
FSDEY

SEQ ID NO: 19618 - protein, 5 aa, Homo sapiens
YFWPS

SEQ ID NO: 19619 - protein, 5 aa, Homo sapiens
DCSKF

SEQ ID NO: 19620 - protein, 5 aa, Homo sapiens
SQTAY

SEQ ID NO: 19621 - protein, 5 aa, Homo sapiens
NKEAV

SEQ ID NO: 19622 - protein, 5 aa, Homo sapiens
CSRKL

SEQ ID NO: 19623 - protein, 5 aa, Homo sapiens
WWQGL

SEQ ID NO: 19624 - protein, 5 aa, Homo sapiens
QKTLL

SEQ ID NO: 19625 - protein, 5 aa, Homo sapiens
QHKDE

SEQ ID NO: 19626 - protein, 5 aa, Homo sapiens
APAVI

SEQ ID NO: 19627 - protein, 5 aa, Homo sapiens
LWLTM

SEQ ID NO: 19628 - protein, 5 aa, Homo sapiens
CVPFK

SEQ ID NO: 19629 - protein, 5 aa, Homo sapiens
RVKWC

SEQ ID NO: 19630 - protein, 5 aa, Homo sapiens
HRHTH

SEQ ID NO: 19631 - protein, 5 aa, Homo sapiens
LTRPL

SEQ ID NO: 19632 - protein, 5 aa, Homo sapiens
RTRLT

SEQ ID NO: 19633 - protein, 5 aa, Homo sapiens
HSGER

SEQ ID NO: 19634 - protein, 5 aa, Homo sapiens
VTUSS

SEQ ID NO: 19635 - protein, 5 aa, Homo sapiens
IRERK

SEQ ID NO: 19636 - protein, 5 aa, Homo sapiens
FIPAL

SEQ ID NO: 19637 - protein, 5 aa, Homo sapiens
HKKAL

SEQ ID NO: 19638 - protein, 5 aa, Homo sapiens
PGVSA

SEQ ID NO: 19639 - protein, 5 aa, Homo sapiens
PERGK

SEQ ID NO: 19640 - protein, 5 aa, Homo sapiens
PMKRK

SEQ ID NO: 19641 - protein, 5 aa, Homo sapiens
FANHV

SEQ ID NO: 19642 - protein, 5 aa, Homo sapiens
GGSCL

SEQ ID NO: 19643 - protein, 5 aa, Homo sapiens
TVSNC

SEQ ID NO: 19644 - protein, 5 aa, Homo sapiens
TTQTT

SEQ ID NO: 19645 - protein, 5 aa, Homo sapiens
THGDL

SEQ ID NO: 19646 - protein, 5 aa, Homo sapiens
SDLIS

SEQ ID NO: 19647 - protein, 5 aa, Homo sapiens
RSRWL

SEQ ID NO: 19648 - protein, 5 aa, Homo sapiens
HWLGE

SEQ ID NO: 19649 - protein, 5 aa, Homo sapiens
FHHVG

SEQ ID NO: 19650 - protein, 5 aa, Homo sapiens
FVNLD

SEQ ID NO: 19651 - protein, 5 aa, Homo sapiens
SSIQE

SEQ ID NO: 19652 - protein, 5 aa, Homo sapiens
ANGQL

SEQ ID NO: 19653 - protein, 5 aa, Homo sapiens
HFGAL

SEQ ID NO: 19654 - protein, 5 aa, Homo sapiens
RRNFN

SEQ ID NO: 19655 - protein, 5 aa, Homo sapiens
ADAAR

SEQ ID NO: 19656 - protein, 5 aa, Homo sapiens
GLHAP

SEQ ID NO: 19657 - protein, 5 aa, Homo sapiens
LLNLE

SEQ ID NO: 19658 - protein, 5 aa, Homo sapiens
QVEDS

SEQ ID NO: 19659 - protein, 5 aa, Homo sapiens
KYVLS

SEQ ID NO: 19660 - protein, 5 aa, Homo sapiens
STGKN

SEQ ID NO: 19661 - protein, 5 aa, Homo sapiens
SWIIQ

SEQ ID NO: 19662 - protein, 5 aa, Homo sapiens
HFSGS

SEQ ID NO: 19663 - protein, 5 aa, Homo sapiens
ETHLW

SEQ ID NO: 19664 - protein, 5 aa, Homo sapiens
SELDN

SEQ ID NO: 19665 - protein, 5 aa, Homo sapiens
STSPS

SEQ ID NO: 19666 - protein, 5 aa, Homo sapiens
AEEHS

SEQ ID NO: 19667 - protein, 5 aa, Homo sapiens
SSTCL

SEQ ID NO: 19668 - protein, 5 aa, Homo sapiens
LPLLF

SEQ ID NO: 19669 - protein, 5 aa, Homo sapiens
PTVTQ

SEQ ID NO: 19670 - protein, 5 aa, Homo sapiens
KVKKE

SEQ ID NO: 19671 - protein, 5 aa, Homo sapiens
LRVLG

SEQ ID NO: 19672 - protein, 5 aa, Homo sapiens
QETFT

SEQ ID NO: 19673 - protein, 5 aa, Homo sapiens
VHLMQ

SEQ ID NO: 19674 - protein, 5 aa, Homo sapiens
ELPSV

SEQ ID NO: 19675 - protein, 5 aa, Homo sapiens
PQEPR

SEQ ID NO: 19676 - protein, 5 aa, Homo sapiens
NSSVY

SEQ ID NO: 19677 - protein, 5 aa, Homo sapiens
ENWFE

SEQ ID NO: 19678 - protein, 5 aa, Homo sapiens
CCWVG

SEQ ID NO: 19679 - protein, 5 aa, Homo sapiens
TCQGH

SEQ ID NO: 19680 - protein, 5 aa, Homo sapiens
YLYDN

SEQ ID NO: 19681 - protein, 5 aa, Homo sapiens
GQEGP

SEQ ID NO: 19682 - protein, 5 aa, Homo sapiens
SNYSS

SEQ ID NO: 19683 - protein, 5 aa, Homo sapiens
KKERR

SEQ ID NO: 19684 - protein, 5 aa, Homo sapiens
REGRN

SEQ ID NO: 19685 - protein, 5 aa, Homo sapiens
LPSYE

SEQ ID NO: 19686 - protein, 5 aa, Homo sapiens
PGLDP

SEQ ID NO: 19687 - protein, 5 aa, Homo sapiens
KIPQK

SEQ ID NO: 19688 - protein, 5 aa, Homo sapiens
SMQSK

SEQ ID NO: 19689 - protein, 5 aa, Homo sapiens
ELPSV

SEQ ID NO: 19690 - protein, 5 aa, Homo sapiens
QISRD

SEQ ID NO: 19691 - protein, 5 aa, Homo sapiens
STTRV

SEQ ID NO: 19692 - protein, 5 aa, Homo sapiens
KGKRD

SEQ ID NO: 19693 - protein, 5 aa, Homo sapiens
EKPKK

SEQ ID NO: 19694 - protein, 5 aa, Homo sapiens
RPRAL

SEQ ID NO: 19695 - protein, 5 aa, Homo sapiens
AICVK

SEQ ID NO: 19696 - protein, 5 aa, Homo sapiens
LLATV

SEQ ID NO: 19697 - protein, 5 aa, Homo sapiens
PLPAL

SEQ ID NO: 19698 - protein, 5 aa, Homo sapiens
GSEPT

SEQ ID NO: 19699 - protein, 5 aa, Homo sapiens
DQDSA

SEQ ID NO: 19700 - protein, 5 aa, Homo sapiens
NVLHQ

SEQ ID NO: 19701 - protein, 5 aa, Homo sapiens
RRIKE

SEQ ID NO: 19702 - protein, 5 aa, Homo sapiens
QPWSV

SEQ ID NO: 19703 - protein, 5 aa, Homo sapiens
HSLQH

SEQ ID NO: 19704 - protein, 5 aa, Homo sapiens
LPMAP

SEQ ID NO: 19705 - protein, 5 aa, Homo sapiens
EDDPQ

SEQ ID NO: 19706 - protein, 5 aa, Homo sapiens
KHSKI

SEQ ID NO: 19707 - protein, 5 aa, Homo sapiens
VLTLG

SEQ ID NO: 19708 - protein, 5 aa, Homo sapiens
VYFSL

SEQ ID NO: 19709 - protein, 5 aa, Homo sapiens
GGQIT

SEQ ID NO: 19710 - protein, 5 aa, Homo sapiens
QPLPS

SEQ ID NO: 19711 - protein, 5 aa, Homo sapiens
GDGTP

SEQ ID NO: 19712 - protein, 5 aa, Homo sapiens
TACHH

SEQ ID NO: 19713 - protein, 5 aa, Homo sapiens
RLKIS

SEQ ID NO: 19714 - protein, 5 aa, Homo sapiens
VPNNV

SEQ ID NO: 19715 - protein, 5 aa, Homo sapiens
QDDAA

SEQ ID NO: 19716 - protein, 5 aa, Homo sapiens
QSSSA

SEQ ID NO: 19717 - protein, 5 aa, Homo sapiens
LSAIG

SEQ ID NO: 19718 - protein, 5 aa, Homo sapiens
TLELS

SEQ ID NO: 19719 - protein, 5 aa, Homo sapiens
TLLEK

SEQ ID NO: 19720 - protein, 5 aa, Homo sapiens
ASQED

SEQ ID NO: 19721 - protein, 5 aa, Homo sapiens
DHYAT

SEQ ID NO: 19722 - protein, 5 aa, Homo sapiens
WAVIL

SEQ ID NO: 19723 - protein, 5 aa, Homo sapiens
IPFIL

SEQ ID NO: 19724 - protein, 5 aa, Homo sapiens
AHLAM

SEQ ID NO: 19725 - protein, 5 aa, Homo sapiens
GRWRL

SEQ ID NO: 19726 - protein, 5 aa, Homo sapiens
HIFNM

SEQ ID NO: 19727 - protein, 5 aa, Homo sapiens
NSDCR

SEQ ID NO: 19728 - protein, 5 aa, Homo sapiens
DSSFL

SEQ ID NO: 19729 - protein, 5 aa, Homo sapiens
ALHSE

SEQ ID NO: 19730 - protein, 5 aa, Homo sapiens
KFDLS

SEQ ID NO: 19731 - protein, 5 aa, Homo sapiens
ILARK

SEQ ID NO: 19732 - protein, 5 aa, Homo sapiens
NSNYY

SEQ ID NO: 19733 - protein, 5 aa, Homo sapiens
PVDIE

SEQ ID NO: 19734 - protein, 5 aa, Homo sapiens
CKEMV

SEQ ID NO: 19735 - protein, 5 aa, Homo sapiens
AGGSK

SEQ ID NO: 19736 - protein, 5 aa, Homo sapiens
NKAET

SEQ ID NO: 19737 - protein, 5 aa, Homo sapiens
MKENS

SEQ ID NO: 19738 - protein, 5 aa, Homo sapiens
NRQEG

SEQ ID NO: 19739 - protein, 5 aa, Homo sapiens
KEILL

SEQ ID NO: 19740 - protein, 5 aa, Homo sapiens
QESVF

SEQ ID NO: 19741 - protein, 5 aa, Homo sapiens
ACLIC

SEQ ID NO: 19742 - protein, 5 aa, Homo sapiens
LDTNI

SEQ ID NO: 19743 - protein, 5 aa, Homo sapiens
CQKRQ

SEQ ID NO: 19744 - protein, 5 aa, Homo sapiens
FLLTL

SEQ ID NO: 19745 - protein, 5 aa, Homo sapiens
TKVAP

SEQ ID NO: 19746 - protein, 5 aa, Homo sapiens
LFDEP

SEQ ID NO: 19747 - protein, 5 aa, Homo sapiens
SFPFL

SEQ ID NO: 19748 - protein, 5 aa, Homo sapiens
GGVAS

SEQ ID NO: 19749 - protein, 5 aa, Homo sapiens
QSVSN

SEQ ID NO: 19750 - protein, 5 aa, Homo sapiens
PDSGF

SEQ ID NO: 19751 - protein, 5 aa, Homo sapiens
KRASS

SEQ ID NO: 19752 - protein, 5 aa, Homo sapiens
HMPPH

SEQ ID NO: 19753 - protein, 5 aa, Homo sapiens
KIYRM

SEQ ID NO: 19754 - protein, 5 aa, Homo sapiens
GLPID

SEQ ID NO: 19755 - protein, 5 aa, Homo sapiens
ASMGR

SEQ ID NO: 19756 - protein, 5 aa, Homo sapiens
ADGGR

SEQ ID NO: 19757 - protein, 5 aa, Homo sapiens
TNKTN

SEQ ID NO: 19758 - protein, 5 aa, Homo sapiens
GGAHL

SEQ ID NO: 19759 - protein, 5 aa, Homo sapiens
LAWLF

SEQ ID NO: 19760 - protein, 5 aa, Homo sapiens
GRPGK

SEQ ID NO: 19761 - protein, 5 aa, Homo sapiens
GHGVS

SEQ ID NO: 19762 - protein, 5 aa, Homo sapiens
FSCFS

SEQ ID NO: 19763 - protein, 5 aa, Homo sapiens
SILVY

SEQ ID NO: 19764 - protein, 5 aa, Homo sapiens
IKVSP

SEQ ID NO: 19765 - protein, 5 aa, Homo sapiens
VWNCY

SEQ ID NO: 19766 - protein, 5 aa, Homo sapiens
QRSQN

SEQ ID NO: 19767 - protein, 5 aa, Homo sapiens
VGSLS

SEQ ID NO: 19768 - protein, 5 aa, Homo sapiens
GEALP

SEQ ID NO: 19769 - protein, 5 aa, Homo sapiens
MLTGG

SEQ ID NO: 19770 - protein, 5 aa, Homo sapiens
MLTCR

SEQ ID NO: 19771 - protein, 5 aa, Homo sapiens
NVATI

SEQ ID NO: 19772 - protein, 5 aa, Homo sapiens
YDEGP

SEQ ID NO: 19773 - protein, 5 aa, Homo sapiens
YDEGP

SEQ ID NO: 19774 - protein, 5 aa, Homo sapiens
LKKVI

SEQ ID NO: 19775 - protein, 5 aa, Homo sapiens
WLNPR

SEQ ID NO: 19776 - protein, 5 aa, Homo sapiens
GNPRA

SEQ ID NO: 19777 - protein, 5 aa, Homo sapiens
LQEAK

SEQ ID NO: 19778 - protein, 5 aa, Homo sapiens
CGNTH

SEQ ID NO: 19779 - protein, 5 aa, Homo sapiens
KLSET

SEQ ID NO: 19780 - protein, 5 aa, Homo sapiens
IFNFL

SEQ ID NO: 19781 - protein, 5 aa, Homo sapiens
SPSDV

SEQ ID NO: 19782 - protein, 5 aa, Homo sapiens
LEGEP

SEQ ID NO: 19783 - protein, 5 aa, Homo sapiens
GMELN

SEQ ID NO: 19784 - protein, 5 aa, Homo sapiens
GTHCR

SEQ ID NO: 19785 - protein, 5 aa, Homo sapiens
GTHYR

SEQ ID NO: 19786 - protein, 5 aa, Homo sapiens
KFDLN

SEQ ID NO: 19787 - protein, 5 aa, Homo sapiens
GMEWN

SEQ ID NO: 19788 - protein, 5 aa, Homo sapiens
GMEWN

SEQ ID NO: 19789 - protein, 5 aa, Homo sapiens
LTPPA

SEQ ID NO: 19790 - protein, 5 aa, Homo sapiens
IDVAE

SEQ ID NO: 19791 - protein, 5 aa, Homo sapiens
QPSAS

SEQ ID NO: 19792 - protein, 5 aa, Homo sapiens
NLSPL

SEQ ID NO: 19793 - protein, 5 aa, Homo sapiens
PPYSP

SEQ ID NO: 19794 - protein, 5 aa, Homo sapiens
TLNFI

SEQ ID NO: 19795 - protein, 5 aa, Homo sapiens
TCIHY

SEQ ID NO: 19796 - protein, 5 aa, Homo sapiens
LSGGL

SEQ ID NO: 19797 - protein, 5 aa, Homo sapiens
KCFEG

SEQ ID NO: 19798 - protein, 5 aa, Homo sapiens
ATCLS

SEQ ID NO: 19799 - protein, 5 aa, Homo sapiens
DDQLC

SEQ ID NO: 19800 - protein, 5 aa, Homo sapiens
QSFNI

SEQ ID NO: 19801 - protein, 5 aa, Homo sapiens
GVNDP

SEQ ID NO: 19802 - protein, 5 aa, Homo sapiens
SESSL

SEQ ID NO: 19803 - protein, 5 aa, Homo sapiens
PPHGV

SEQ ID NO: 19804 - protein, 5 aa, Homo sapiens
LEVSN

SEQ ID NO: 19805 - protein, 5 aa, Homo sapiens
QTHRY

SEQ ID NO: 19806 - protein, 5 aa, Homo sapiens
DCSVS

SEQ ID NO: 19807 - protein, 5 aa, Homo sapiens
THDVN

SEQ ID NO: 19808 - protein, 5 aa, Homo sapiens
VPGEN

SEQ ID NO: 19809 - protein, 5 aa, Homo sapiens
SAEEQ

SEQ ID NO: 19810 - protein, 5 aa, Homo sapiens
PFQGF

SEQ ID NO: 19811 - protein, 5 aa, Homo sapiens
KLHYK

SEQ ID NO: 19812 - protein, 5 aa, Homo sapiens
QVVQF

SEQ ID NO: 19813 - protein, 5 aa, Homo sapiens
SSSKK

SEQ ID NO: 19814 - protein, 5 aa, Homo sapiens
WKLWR

SEQ ID NO: 19815 - protein, 5 aa, Homo sapiens
EALGL

SEQ ID NO: 19816 - protein, 5 aa, Homo sapiens
QMQPI

SEQ ID NO: 19817 - protein, 5 aa, Homo sapiens
LYQIS

SEQ ID NO: 19818 - protein, 5 aa, Homo sapiens
GKDEL

SEQ ID NO: 19819 - protein, 5 aa, Homo sapiens
GDVSK

SEQ ID NO: 19820 - protein, 5 aa, Homo sapiens
TAPLF

SEQ ID NO: 19821 - protein, 5 aa, Homo sapiens
RVSCK

SEQ ID NO: 19822 - protein, 5 aa, Homo sapiens
GRSDH

SEQ ID NO: 19823 - protein, 5 aa, Homo sapiens
LARFC

SEQ ID NO: 19824 - protein, 5 aa, Homo sapiens
WNVEC

SEQ ID NO: 19825 - protein, 5 aa, Homo sapiens
VTKIY

SEQ ID NO: 19826 - protein, 5 aa, Homo sapiens
FVEGF

SEQ ID NO: 19827 - protein, 5 aa, Homo sapiens
HHRCN

SEQ ID NO: 19828 - protein, 5 aa, Homo sapiens
DNMAG

SEQ ID NO: 19829 - protein, 5 aa, Homo sapiens
VQRLT

SEQ ID NO: 19830 - protein, 5 aa, Homo sapiens
WMRTN

SEQ ID NO: 19831 - protein, 5 aa, Homo sapiens
KLLWC

SEQ ID NO: 19832 - protein, 5 aa, Homo sapiens
DNLAT

SEQ ID NO: 19833 - protein, 5 aa, Homo sapiens
RPDEW

SEQ ID NO: 19834 - protein, 5 aa, Homo sapiens
APLIR

SEQ ID NO: 19835 - protein, 5 aa, Homo sapiens
WNKSD

SEQ ID NO: 19836 - protein, 5 aa, Homo sapiens
AKANF

SEQ ID NO: 19837 - protein, 5 aa, Homo sapiens
EINTS

SEQ ID NO: 19838 - protein, 5 aa, Homo sapiens
MGQRP

SEQ ID NO: 19839 - protein, 5 aa, Homo sapiens
GRSFH

SEQ ID NO: 19840 - protein, 5 aa, Homo sapiens
LGHLL

SEQ ID NO: 19841 - protein, 5 aa, Homo sapiens
ASSSS

SEQ ID NO: 19842 - protein, 5 aa, Homo sapiens
QRCSQ

SEQ ID NO: 19843 - protein, 5 aa, Homo sapiens
KQSQC

SEQ ID NO: 19844 - protein, 5 aa, Homo sapiens
QRCSQ

SEQ ID NO: 19845 - protein, 5 aa, Homo sapiens
SECDI

SEQ ID NO: 19846 - protein, 5 aa, Homo sapiens
QSIRC

SEQ ID NO: 19847 - protein, 5 aa, Homo sapiens
PCIGW

SEQ ID NO: 19848 - protein, 5 aa, Homo sapiens
KQSQC

SEQ ID NO: 19849 - protein, 5 aa, Homo sapiens
KRGKR

SEQ ID NO: 19850 - protein, 5 aa, Homo sapiens
LLKLE

SEQ ID NO: 19851 - protein, 5 aa, Homo sapiens
SKTLK

SEQ ID NO: 19852 - protein, 5 aa, Homo sapiens
KQSQC

SEQ ID NO: 19853 - protein, 5 aa, Homo sapiens
KQSQC

SEQ ID NO: 19854 - protein, 5 aa, Homo sapiens
TWGSL

SEQ ID NO: 19855 - protein, 5 aa, Homo sapiens
ESTTV

SEQ ID NO: 19856 - protein, 5 aa, Homo sapiens
SLISA

SEQ ID NO: 19857 - protein, 5 aa, Homo sapiens
SCSSP

SEQ ID NO: 19858 - protein, 5 aa, Homo sapiens
DEAAS

SEQ ID NO: 19859 - protein, 5 aa, Homo sapiens
GGPAP

SEQ ID NO: 19860 - protein, 5 aa, Homo sapiens
GGWPL

SEQ ID NO: 19861 - protein, 5 aa, Homo sapiens
LGYWE

SEQ ID NO: 19862 - protein, 5 aa, Homo sapiens
PDHQN

SEQ ID NO: 19863 - protein, 5 aa, Homo sapiens
PRRWL

SEQ ID NO: 19864 - protein, 5 aa, Homo sapiens
HTHTH

SEQ ID NO: 19865 - protein, 5 aa, Homo sapiens
PPRAP

SEQ ID NO: 19866 - protein, 5 aa, Homo sapiens
LKKQN

SEQ ID NO: 19867 - protein, 5 aa, Homo sapiens
QQVVT

SEQ ID NO: 19868 - protein, 5 aa, Homo sapiens
VYQTY

SEQ ID NO: 19869 - protein, 5 aa, Homo sapiens
STAGT

SEQ ID NO: 19870 - protein, 5 aa, Homo sapiens
ECKIF

SEQ ID NO: 19871 - protein, 5 aa, Homo sapiens
ERNAR

SEQ ID NO: 19872 - protein, 5 aa, Homo sapiens
ARMTC

SEQ ID NO: 19873 - protein, 5 aa, Homo sapiens
FVFKI

SEQ ID NO: 19874 - protein, 5 aa, Homo sapiens
ASVTP

SEQ ID NO: 19875 - protein, 5 aa, Homo sapiens
AWSRA

SEQ ID NO: 19876 - protein, 5 aa, Homo sapiens
ASVFT

SEQ ID NO: 19877 - protein, 5 aa, Homo sapiens
REYCR

SEQ ID NO: 19878 - protein, 5 aa, Homo sapiens
WVKEE

SEQ ID NO: 19879 - protein, 5 aa, Homo sapiens
AEINV

SEQ ID NO: 19880 - protein, 5 aa, Homo sapiens
KSSKY

SEQ ID NO: 19881 - protein, 5 aa, Homo sapiens
PLHQE

SEQ ID NO: 19882 - protein, 5 aa, Homo sapiens
PELDF

SEQ ID NO: 19883 - protein, 5 aa, Homo sapiens
MMDTV

SEQ ID NO: 19884 - protein, 5 aa, Homo sapiens
KSTPV

SEQ ID NO: 19885 - protein, 5 aa, Homo sapiens
LDRWG

SEQ ID NO: 19886 - protein, 5 aa, Homo sapiens
TPSCK

SEQ ID NO: 19887 - protein, 5 aa, Homo sapiens
PQPPE

SEQ ID NO: 19888 - protein, 5 aa, Homo sapiens
GGSQL

SEQ ID NO: 19889 - protein, 5 aa, Homo sapiens
SSLKG

SEQ ID NO: 19890 - protein, 5 aa, Homo sapiens
LWSQR

SEQ ID NO: 19891 - protein, 5 aa, Homo sapiens
MDTEL

SEQ ID NO: 19892 - protein, 5 aa, Homo sapiens
IKIHN

SEQ ID NO: 19893 - protein, 5 aa, Homo sapiens
TLQRS

SEQ ID NO: 19894 - protein, 5 aa, Homo sapiens
EQRYF

SEQ ID NO: 19895 - protein, 5 aa, Homo sapiens
KSSKK

SEQ ID NO: 19896 - protein, 5 aa, Homo sapiens
NVKKN

SEQ ID NO: 19897 - protein, 5 aa, Homo sapiens
CKHKL

SEQ ID NO: 19898 - protein, 5 aa, Homo sapiens
DIMIA

SEQ ID NO: 19899 - protein, 5 aa, Homo sapiens
KQQLI

SEQ ID NO: 19900 - protein, 5 aa, Homo sapiens
PETSV

SEQ ID NO: 19901 - protein, 5 aa, Homo sapiens
AHHKR

SEQ ID NO: 19902 - protein, 5 aa, Homo sapiens
AEPVT

SEQ ID NO: 19903 - protein, 5 aa, Homo sapiens
RPLDI

SEQ ID NO: 19904 - protein, 5 aa, Homo sapiens
VDSWN

SEQ ID NO: 19905 - protein, 5 aa, Homo sapiens
TGDTT

SEQ ID NO: 19906 - protein, 5 aa, Homo sapiens
ADKDE

SEQ ID NO: 19907 - protein, 5 aa, Homo sapiens
TGDTT

SEQ ID NO: 19908 - protein, 5 aa, Homo sapiens
PIPEL

SEQ ID NO: 19909 - protein, 5 aa, Homo sapiens
HTPRA

SEQ ID NO: 19910 - protein, 5 aa, Homo sapiens
RRSLT

SEQ ID NO: 19911 - protein, 5 aa, Homo sapiens
NDVKS

SEQ ID NO: 19912 - protein, 5 aa, Homo sapiens
KRISS

SEQ ID NO: 19913 - protein, 5 aa, Homo sapiens
KIHSP

SEQ ID NO: 19914 - protein, 5 aa, Homo sapiens
FSCPW

SEQ ID NO: 19915 - protein, 5 aa, Homo sapiens
TPDLQ

SEQ ID NO: 19916 - protein, 5 aa, Homo sapiens
EELWT

SEQ ID NO: 19917 - protein, 5 aa, Homo sapiens
QPKAD

SEQ ID NO: 19918 - protein, 5 aa, Homo sapiens
PLPHS

SEQ ID NO: 19919 - protein, 5 aa, Homo sapiens
EPHSG

SEQ ID NO: 19920 - protein, 5 aa, Homo sapiens
VYTEG

SEQ ID NO: 19921 - protein, 5 aa, Homo sapiens
ALSVS

SEQ ID NO: 19922 - protein, 5 aa, Homo sapiens
KLGSH

SEQ ID NO: 19923 - protein, 5 aa, Homo sapiens
RWLPG

SEQ ID NO: 19924 - protein, 5 aa, Homo sapiens
QDISP

SEQ ID NO: 19925 - protein, 5 aa, Homo sapiens
WRKSL

SEQ ID NO: 19926 - protein, 5 aa, Homo sapiens
HRAWP

SEQ ID NO: 19927 - protein, 5 aa, Homo sapiens
HYSQG

SEQ ID NO: 19928 - protein, 5 aa, Homo sapiens
FKGVS

SEQ ID NO: 19929 - protein, 5 aa, Homo sapiens
VLQTL

SEQ ID NO: 19930 - protein, 5 aa, Homo sapiens
FPMIT

SEQ ID NO: 19931 - protein, 5 aa, Homo sapiens
TYTAV

SEQ ID NO: 19932 - protein, 5 aa, Homo sapiens
IDQRF

SEQ ID NO: 19933 - protein, 5 aa, Homo sapiens
KKKSK

SEQ ID NO: 19934 - protein, 5 aa, Homo sapiens
DAMFT

SEQ ID NO: 19935 - protein, 5 aa, Homo sapiens
KRKNR

SEQ ID NO: 19936 - protein, 5 aa, Homo sapiens
EFKAE

SEQ ID NO: 19937 - protein, 5 aa, Homo sapiens
VMPPP

SEQ ID NO: 19938 - protein, 5 aa, Homo sapiens
CKIEF

SEQ ID NO: 19939 - protein, 5 aa, Homo sapiens
MLFAL

SEQ ID NO: 19940 - protein, 5 aa, Homo sapiens
VPKQS

SEQ ID NO: 19941 - protein, 5 aa, Homo sapiens
LKLDW

SEQ ID NO: 19942 - protein, 5 aa, Homo sapiens
DYVSH

SEQ ID NO: 19943 - protein, 5 aa, Homo sapiens
LPSRE

SEQ ID NO: 19944 - protein, 5 aa, Homo sapiens
EKQDR

SEQ ID NO: 19945 - protein, 5 aa, Homo sapiens
ECTAL

SEQ ID NO: 19946 - protein, 5 aa, Homo sapiens
RLSFM

SEQ ID NO: 19947 - protein, 5 aa, Homo sapiens
FGSPK

SEQ ID NO: 19948 - protein, 5 aa, Homo sapiens
FVEGL

SEQ ID NO: 19949 - protein, 5 aa, Homo sapiens
NKIYL

SEQ ID NO: 19950 - protein, 5 aa, Homo sapiens
LSPPF

SEQ ID NO: 19951 - protein, 5 aa, Homo sapiens
PDHSP

SEQ ID NO: 19952 - protein, 5 aa, Homo sapiens
ICLWS

SEQ ID NO: 19953 - protein, 5 aa, Homo sapiens
PRQEN

SEQ ID NO: 19954 - protein, 5 aa, Homo sapiens
SNIQK

SEQ ID NO: 19955 - protein, 5 aa, Homo sapiens
SSGAH

SEQ ID NO: 19956 - protein, 5 aa, Homo sapiens
GLLRL

SEQ ID NO: 19957 - protein, 5 aa, Homo sapiens
DDDLA

SEQ ID NO: 19958 - protein, 5 aa, Homo sapiens
HKPLP

SEQ ID NO: 19959 - protein, 5 aa, Homo sapiens
MYLFI

SEQ ID NO: 19960 - protein, 5 aa, Homo sapiens
TPFRK

SEQ ID NO: 19961 - protein, 5 aa, Homo sapiens
VDLSL

SEQ ID NO: 19962 - protein, 5 aa, Homo sapiens
TPALK

SEQ ID NO: 19963 - protein, 5 aa, Homo sapiens
ECKAA

SEQ ID NO: 19964 - protein, 5 aa, Homo sapiens
TVTLR

SEQ ID NO: 19965 - protein, 5 aa, Homo sapiens
YHILL

SEQ ID NO: 19966 - protein, 5 aa, Homo sapiens
FPFCP

SEQ ID NO: 19967 - protein, 5 aa, Homo sapiens
LFSSQ

SEQ ID NO: 19968 - protein, 5 aa, Homo sapiens
DLGDV

SEQ ID NO: 19969 - protein, 5 aa, Homo sapiens
THGLT

SEQ ID NO: 19970 - protein, 5 aa, Homo sapiens
QEAFV

SEQ ID NO: 19971 - protein, 5 aa, Homo sapiens
HPPQG

SEQ ID NO: 19972 - protein, 5 aa, Homo sapiens
CQCKI

SEQ ID NO: 19973 - protein, 5 aa, Homo sapiens
RQALC

SEQ ID NO: 19974 - protein, 5 aa, Homo sapiens
TLQPG

SEQ ID NO: 19975 - protein, 5 aa, Homo sapiens
AHDIR

SEQ ID NO: 19976 - protein, 5 aa, Homo sapiens
CQCKI

SEQ ID NO: 19977 - protein, 5 aa, Homo sapiens
CQCKI

SEQ ID NO: 19978 - protein, 5 aa, Homo sapiens
CQCKI

SEQ ID NO: 19979 - protein, 5 aa, Homo sapiens
LMDSE

SEQ ID NO: 19980 - protein, 5 aa, Homo sapiens
PSAGR

SEQ ID NO: 19981 - protein, 5 aa, Homo sapiens
RREQP

SEQ ID NO: 19982 - protein, 5 aa, Homo sapiens
SQRSK

SEQ ID NO: 19983 - protein, 5 aa, Homo sapiens
RPAVT

SEQ ID NO: 19984 - protein, 5 aa, Homo sapiens
SILIC

SEQ ID NO: 19985 - protein, 5 aa, Homo sapiens
GNPAP

SEQ ID NO: 19986 - protein, 5 aa, Homo sapiens
ILTGK

SEQ ID NO: 19987 - protein, 5 aa, Homo sapiens
DPWVH

SEQ ID NO: 19988 - protein, 5 aa, Homo sapiens
WHFVM

SEQ ID NO: 19989 - protein, 5 aa, Homo sapiens
PSIWK

SEQ ID NO: 19990 - protein, 5 aa, Homo sapiens
KHRPM

SEQ ID NO: 19991 - protein, 5 aa, Homo sapiens
SSKPV

SEQ ID NO: 19992 - protein, 5 aa, Homo sapiens
LTPDG

SEQ ID NO: 19993 - protein, 5 aa, Homo sapiens
GYIMR

SEQ ID NO: 19994 - protein, 5 aa, Homo sapiens
FSTDV

SEQ ID NO: 19995 - protein, 5 aa, Homo sapiens
LTASL

SEQ ID NO: 19996 - protein, 5 aa, Homo sapiens
AFASQ

SEQ ID NO: 19997 - protein, 5 aa, Homo sapiens
REGVL

SEQ ID NO: 19998 - protein, 5 aa, Homo sapiens
RLGSL

SEQ ID NO: 19999 - protein, 5 aa, Homo sapiens
VACGD

SEQ ID NO: 20000 - protein, 5 aa, Homo sapiens
SHLLE

SEQ ID NO: 20001 - protein, 5 aa, Homo sapiens
CNFIS

SEQ ID NO: 20002 - protein, 5 aa, Homo sapiens
HGPLL

SEQ ID NO: 20003 - protein, 5 aa, Homo sapiens
IEEDE

SEQ ID NO: 20004 - protein, 5 aa, Homo sapiens
SPVGR

SEQ ID NO: 20005 - protein, 5 aa, Homo sapiens
PRSQK

SEQ ID NO: 20006 - protein, 5 aa, Homo sapiens
RGSFD

SEQ ID NO: 20007 - protein, 5 aa, Homo sapiens
MQQKV

SEQ ID NO: 20008 - protein, 5 aa, Homo sapiens
PLVSG

SEQ ID NO: 20009 - protein, 5 aa, Homo sapiens
CPNIF

SEQ ID NO: 20010 - protein, 5 aa, Homo sapiens
LTAVF

SEQ ID NO: 20011 - protein, 5 aa, Homo sapiens
YASVI

SEQ ID NO: 20012 - protein, 5 aa, Homo sapiens
PVRGE

SEQ ID NO: 20013 - protein, 5 aa, Homo sapiens
ACWWL

SEQ ID NO: 20014 - protein, 5 aa, Homo sapiens
ESDHN

SEQ ID NO: 20015 - protein, 5 aa, Homo sapiens
PVRGE

SEQ ID NO: 20016 - protein, 5 aa, Homo sapiens
ESGSK

SEQ ID NO: 20017 - protein, 5 aa, Homo sapiens
SRTQL

SEQ ID NO: 20018 - protein, 5 aa, Homo sapiens
AQFSK

SEQ ID NO: 20019 - protein, 5 aa, Homo sapiens
TFSKA

SEQ ID NO: 20020 - protein, 5 aa, Homo sapiens
MTLMG

SEQ ID NO: 20021 - protein, 5 aa, Homo sapiens
GVAGH

SEQ ID NO: 20022 - protein, 5 aa, Homo sapiens
ILSQS

SEQ ID NO: 20023 - protein, 5 aa, Homo sapiens
RYSDD

SEQ ID NO: 20024 - protein, 5 aa, Homo sapiens
GKGLF

SEQ ID NO: 20025 - protein, 5 aa, Homo sapiens
SQKNL

SEQ ID NO: 20026 - protein, 5 aa, Homo sapiens
TTVTS

SEQ ID NO: 20027 - protein, 5 aa, Homo sapiens
AEEGR

SEQ ID NO: 20028 - protein, 5 aa, Homo sapiens
HPRDS

SEQ ID NO: 20029 - protein, 5 aa, Homo sapiens
KTQST

SEQ ID NO: 20030 - protein, 5 aa, Homo sapiens
PRSQK

SEQ ID NO: 20031 - protein, 5 aa, Homo sapiens
VSPTG

SEQ ID NO: 20032 - protein, 5 aa, Homo sapiens
HFRWN

SEQ ID NO: 20033 - protein, 5 aa, Homo sapiens
EKVTV

SEQ ID NO: 20034 - protein, 5 aa, Homo sapiens
ALTHN

SEQ ID NO: 20035 - protein, 5 aa, Homo sapiens
HGPLL

SEQ ID NO: 20036 - protein, 5 aa, Homo sapiens
SHLLE

SEQ ID NO: 20037 - protein, 5 aa, Homo sapiens
GKVEE

SEQ ID NO: 20038 - protein, 5 aa, Homo sapiens
DQVCT

SEQ ID NO: 20039 - protein, 5 aa, Homo sapiens
AAGTQ

SEQ ID NO: 20040 - protein, 5 aa, Homo sapiens
IQRRD

SEQ ID NO: 20041 - protein, 5 aa, Homo sapiens
QIMKA

SEQ ID NO: 20042 - protein, 5 aa, Homo sapiens
VKAVF

SEQ ID NO: 20043 - protein, 5 aa, Homo sapiens
QRRPH

SEQ ID NO: 20044 - protein, 5 aa, Homo sapiens
WTITY

SEQ ID NO: 20045 - protein, 5 aa, Homo sapiens
PLGII

SEQ ID NO: 20046 - protein, 5 aa, Homo sapiens
YESSL

SEQ ID NO: 20047 - protein, 5 aa, Homo sapiens
LGSED

SEQ ID NO: 20048 - protein, 5 aa, Homo sapiens
KRDHP

SEQ ID NO: 20049 - protein, 5 aa, Homo sapiens
KRDHP

SEQ ID NO: 20050 - protein, 5 aa, Homo sapiens
DHSPA

SEQ ID NO: 20051 - protein, 5 aa, Homo sapiens
VGGSG

SEQ ID NO: 20052 - protein, 5 aa, Homo sapiens
DDLDF

SEQ ID NO: 20053 - protein, 5 aa, Homo sapiens
LQQTH

SEQ ID NO: 20054 - protein, 5 aa, Homo sapiens
SKVSR

SEQ ID NO: 20055 - protein, 5 aa, Homo sapiens
CLWNT

SEQ ID NO: 20056 - protein, 5 aa, Homo sapiens
SKCCQ

SEQ ID NO: 20057 - protein, 5 aa, Homo sapiens
NYDEY

SEQ ID NO: 20058 - protein, 5 aa, Homo sapiens
SAGPS

SEQ ID NO: 20059 - protein, 5 aa, Homo sapiens
LRLCT

SEQ ID NO: 20060 - protein, 5 aa, Homo sapiens
QQSRR

SEQ ID NO: 20061 - protein, 5 aa, Homo sapiens
RRHGH

SEQ ID NO: 20062 - protein, 5 aa, Homo sapiens
PGVQG

SEQ ID NO: 20063 - protein, 5 aa, Homo sapiens
ESGTF

SEQ ID NO: 20064 - protein, 5 aa, Homo sapiens
HLTAT

SEQ ID NO: 20065 - protein, 5 aa, Homo sapiens
RMRPY

SEQ ID NO: 20066 - protein, 5 aa, Homo sapiens
DCFLY

SEQ ID NO: 20067 - protein, 5 aa, Homo sapiens
TMKRY

SEQ ID NO: 20068 - protein, 5 aa, Homo sapiens
KIINI

SEQ ID NO: 20069 - protein, 5 aa, Homo sapiens
AQEYV

SEQ ID NO: 20070 - protein, 5 aa, Homo sapiens
KERKK

SEQ ID NO: 20071 - protein, 5 aa, Homo sapiens
TTPVC

SEQ ID NO: 20072 - protein, 5 aa, Homo sapiens
LLRRF

SEQ ID NO: 20073 - protein, 5 aa, Homo sapiens
GQAKK

SEQ ID NO: 20074 - protein, 5 aa, Homo sapiens
SSISW

SEQ ID NO: 20075 - protein, 5 aa, Homo sapiens
KPNLK

SEQ ID NO: 20076 - protein, 5 aa, Homo sapiens
CAAVL

SEQ ID NO: 20077 - protein, 5 aa, Homo sapiens
PLHLQ

SEQ ID NO: 20078 - protein, 5 aa, Homo sapiens
HGPLL

SEQ ID NO: 20079 - protein, 5 aa, Homo sapiens
QPVYV

SEQ ID NO: 20080 - protein, 5 aa, Homo sapiens
VSVPK

SEQ ID NO: 20081 - protein, 5 aa, Homo sapiens
AESCI

SEQ ID NO: 20082 - protein, 5 aa, Homo sapiens
PWSCP

SEQ ID NO: 20083 - protein, 5 aa, Homo sapiens
QAIPI

SEQ ID NO: 20084 - protein, 5 aa, Homo sapiens
DADYD

SEQ ID NO: 20085 - protein, 5 aa, Homo sapiens
VVTPC

SEQ ID NO: 20086 - protein, 5 aa, Homo sapiens
RLFWE

SEQ ID NO: 20087 - protein, 5 aa, Homo sapiens
DYKMR

SEQ ID NO: 20088 - protein, 5 aa, Homo sapiens
DSDLE

SEQ ID NO: 20089 - protein, 5 aa, Homo sapiens
TAEAE

SEQ ID NO: 20090 - protein, 5 aa, Homo sapiens
THRSR

SEQ ID NO: 20091 - protein, 5 aa, Homo sapiens
GDAKD

SEQ ID NO: 20092 - protein, 5 aa, Homo sapiens
KSSLV

SEQ ID NO: 20093 - protein, 5 aa, Homo sapiens
KGQKL

SEQ ID NO: 20094 - protein, 5 aa, Homo sapiens
VSVPK

SEQ ID NO: 20095 - protein, 5 aa, Homo sapiens
KQRQM

SEQ ID NO: 20096 - protein, 5 aa, Homo sapiens
ECYFR

SEQ ID NO: 20097 - protein, 5 aa, Homo sapiens
QGRTR

SEQ ID NO: 20098 - protein, 5 aa, Homo sapiens
LLVCQ

SEQ ID NO: 20099 - protein, 5 aa, Homo sapiens
KPNLK

SEQ ID NO: 20100 - protein, 5 aa, Homo sapiens
DSSRY

SEQ ID NO: 20101 - protein, 5 aa, Homo sapiens
SASRF

SEQ ID NO: 20102 - protein, 5 aa, Homo sapiens
IIHNA

SEQ ID NO: 20103 - protein, 5 aa, Homo sapiens
PICCY

SEQ ID NO: 20104 - protein, 5 aa, Homo sapiens
RPGHF

SEQ ID NO: 20105 - protein, 5 aa, Homo sapiens
WAFCC

SEQ ID NO: 20106 - protein, 5 aa, Homo sapiens
PAGRC

SEQ ID NO: 20107 - protein, 5 aa, Homo sapiens
WAFCC

SEQ ID NO: 20108 - protein, 5 aa, Homo sapiens
ALGMD

SEQ ID NO: 20109 - protein, 5 aa, Homo sapiens
TQREA

SEQ ID NO: 20110 - protein, 5 aa, Homo sapiens
QSYNT

SEQ ID NO: 20111 - protein, 5 aa, Homo sapiens
LTKGF

SEQ ID NO: 20112 - protein, 5 aa, Homo sapiens
LQARG

SEQ ID NO: 20113 - protein, 5 aa, Homo sapiens
DEDVL

SEQ ID NO: 20114 - protein, 5 aa, Homo sapiens
SSLIQ

SEQ ID NO: 20115 - protein, 5 aa, Homo sapiens
SQKSL

SEQ ID NO: 20116 - protein, 5 aa, Homo sapiens
SQRPW

SEQ ID NO: 20117 - protein, 5 aa, Homo sapiens
MYHLT

SEQ ID NO: 20118 - protein, 5 aa, Homo sapiens
WNESC

SEQ ID NO: 20119 - protein, 5 aa, Homo sapiens
MWVGY

SEQ ID NO: 20120 - protein, 5 aa, Homo sapiens
MLPGH

SEQ ID NO: 20121 - protein, 5 aa, Homo sapiens
PAECS

SEQ ID NO: 20122 - protein, 5 aa, Homo sapiens
DGPDK

SEQ ID NO: 20123 - protein, 5 aa, Homo sapiens
PEMNK

SEQ ID NO: 20124 - protein, 5 aa, Homo sapiens
SLAQT

SEQ ID NO: 20125 - protein, 5 aa, Homo sapiens
KLASP

SEQ ID NO: 20126 - protein, 5 aa, Homo sapiens
IQFSG

SEQ ID NO: 20127 - protein, 5 aa, Homo sapiens
AASDA

SEQ ID NO: 20128 - protein, 5 aa, Homo sapiens
ITLLG

SEQ ID NO: 20129 - protein, 5 aa, Homo sapiens
LDCGI

SEQ ID NO: 20130 - protein, 5 aa, Homo sapiens
DSSRY

SEQ ID NO: 20131 - protein, 5 aa, Homo sapiens
SRART

SEQ ID NO: 20132 - protein, 5 aa, Homo sapiens
RVCSP

SEQ ID NO: 20133 - protein, 5 aa, Homo sapiens
VDCRV

SEQ ID NO: 20134 - protein, 5 aa, Homo sapiens
KFCSP

SEQ ID NO: 20135 - protein, 5 aa, Homo sapiens
LVAPS

SEQ ID NO: 20136 - protein, 5 aa, Homo sapiens
LINTR

SEQ ID NO: 20137 - protein, 5 aa, Homo sapiens
RGSHI

SEQ ID NO: 20138 - protein, 5 aa, Homo sapiens
SQKSL

SEQ ID NO: 20139 - protein, 5 aa, Homo sapiens
SLHSA

SEQ ID NO: 20140 - protein, 5 aa, Homo sapiens
SQRPW

SEQ ID NO: 20141 - protein, 5 aa, Homo sapiens
GLLIK

SEQ ID NO: 20142 - protein, 5 aa, Homo sapiens
SQPPK

SEQ ID NO: 20143 - protein, 5 aa, Homo sapiens
VSSDN

SEQ ID NO: 20144 - protein, 5 aa, Homo sapiens
LKKSR

SEQ ID NO: 20145 - protein, 5 aa, Homo sapiens
SDLFL

SEQ ID NO: 20146 - protein, 5 aa, Homo sapiens
GHRPP

SEQ ID NO: 20147 - protein, 5 aa, Homo sapiens
LKETS

SEQ ID NO: 20148 - protein, 5 aa, Homo sapiens
GASSS

SEQ ID NO: 20149 - protein, 5 aa, Homo sapiens
FSAFY

SEQ ID NO: 20150 - protein, 5 aa, Homo sapiens
LWCHI

SEQ ID NO: 20151 - protein, 5 aa, Homo sapiens
SKKCH

SEQ ID NO: 20152 - protein, 5 aa, Homo sapiens
GGVWI

SEQ ID NO: 20153 - protein, 5 aa, Homo sapiens
SYSAR

SEQ ID NO: 20154 - protein, 5 aa, Homo sapiens
PRKKF

SEQ ID NO: 20155 - protein, 5 aa, Homo sapiens
YVYFL

SEQ ID NO: 20156 - protein, 5 aa, Homo sapiens
QLPSK

SEQ ID NO: 20157 - protein, 5 aa, Homo sapiens
LRRTC

SEQ ID NO: 20158 - protein, 5 aa, Homo sapiens
LHLYS

SEQ ID NO: 20159 - protein, 5 aa, Homo sapiens
EGKWL

SEQ ID NO: 20160 - protein, 5 aa, Homo sapiens
SRSVR

SEQ ID NO: 20161 - protein, 5 aa, Homo sapiens
SKKPV

SEQ ID NO: 20162 - protein, 5 aa, Homo sapiens
QGPCL

SEQ ID NO: 20163 - protein, 5 aa, Homo sapiens
GWEVR

SEQ ID NO: 20164 - protein, 5 aa, Homo sapiens
EHTLF

SEQ ID NO: 20165 - protein, 5 aa, Homo sapiens
LESTL

SEQ ID NO: 20166 - protein, 5 aa, Homo sapiens
KAMNM

SEQ ID NO: 20167 - protein, 5 aa, Homo sapiens
ASTLA

SEQ ID NO: 20168 - protein, 5 aa, Homo sapiens
FKIGM

SEQ ID NO: 20169 - protein, 5 aa, Homo sapiens
PSFCL

SEQ ID NO: 20170 - protein, 5 aa, Homo sapiens
KIDEF

SEQ ID NO: 20171 - protein, 5 aa, Homo sapiens
STTRV

SEQ ID NO: 20172 - protein, 5 aa, Homo sapiens
DEDTD

SEQ ID NO: 20173 - protein, 5 aa, Homo sapiens
TSQQL

SEQ ID NO: 20174 - protein, 5 aa, Homo sapiens
CVPLP

SEQ ID NO: 20175 - protein, 5 aa, Homo sapiens
WPAGH

SEQ ID NO: 20176 - protein, 5 aa, Homo sapiens
MTNVS

SEQ ID NO: 20177 - protein, 5 aa, Homo sapiens
SKLKT

SEQ ID NO: 20178 - protein, 5 aa, Homo sapiens
NDDKN

SEQ ID NO: 20179 - protein, 5 aa, Homo sapiens
CSCSH

SEQ ID NO: 20180 - protein, 5 aa, Homo sapiens
EITCF

SEQ ID NO: 20181 - protein, 5 aa, Homo sapiens
RGARP

SEQ ID NO: 20182 - protein, 5 aa, Homo sapiens
RSPKM

SEQ ID NO: 20183 - protein, 5 aa, Homo sapiens
CADSF

SEQ ID NO: 20184 - protein, 5 aa, Homo sapiens
GLLPT

SEQ ID NO: 20185 - protein, 5 aa, Homo sapiens
CADSF

SEQ ID NO: 20186 - protein, 5 aa, Homo sapiens
LNRSG

SEQ ID NO: 20187 - protein, 5 aa, Homo sapiens
VFFLV

SEQ ID NO: 20188 - protein, 5 aa, Homo sapiens
PGHME

SEQ ID NO: 20189 - protein, 5 aa, Homo sapiens
VCTVR

SEQ ID NO: 20190 - protein, 5 aa, Homo sapiens
SIHPA

SEQ ID NO: 20191 - protein, 5 aa, Homo sapiens
RLREP

SEQ ID NO: 20192 - protein, 5 aa, Homo sapiens
PRRRR

SEQ ID NO: 20193 - protein, 5 aa, Homo sapiens
LYSGI

SEQ ID NO: 20194 - protein, 5 aa, Homo sapiens
REITE

SEQ ID NO: 20195 - protein, 5 aa, Homo sapiens
LNVKI

SEQ ID NO: 20196 - protein, 5 aa, Homo sapiens
QDWKD

SEQ ID NO: 20197 - protein, 5 aa, Homo sapiens
AVGDS

SEQ ID NO: 20198 - protein, 5 aa, Homo sapiens
AFYGF

SEQ ID NO: 20199 - protein, 5 aa, Homo sapiens
GMECN

SEQ ID NO: 20200 - protein, 5 aa, Homo sapiens
GSGSL

SEQ ID NO: 20201 - protein, 5 aa, Homo sapiens
LRTLP

SEQ ID NO: 20202 - protein, 5 aa, Homo sapiens
QKLTA

SEQ ID NO: 20203 - protein, 5 aa, Homo sapiens
LGYVK

SEQ ID NO: 20204 - protein, 5 aa, Homo sapiens
YNAIS

SEQ ID NO: 20205 - protein, 5 aa, Homo sapiens
GLLPT

SEQ ID NO: 20206 - protein, 5 aa, Homo sapiens
SQLLS

SEQ ID NO: 20207 - protein, 5 aa, Homo sapiens
RFSRR

SEQ ID NO: 20208 - protein, 5 aa, Homo sapiens
RFSRR

SEQ ID NO: 20209 - protein, 5 aa, Homo sapiens
LYYVN

SEQ ID NO: 20210 - protein, 5 aa, Homo sapiens
KLRQK

SEQ ID NO: 20211 - protein, 5 aa, Homo sapiens
PHVFI

SEQ ID NO: 20212 - protein, 5 aa, Homo sapiens
GRSWK

SEQ ID NO: 20213 - protein, 5 aa, Homo sapiens
TKKET

SEQ ID NO: 20214 - protein, 5 aa, Homo sapiens
IITFQ

SEQ ID NO: 20215 - protein, 5 aa, Homo sapiens
GANAH

SEQ ID NO: 20216 - protein, 5 aa, Homo sapiens
QEEVD

SEQ ID NO: 20217 - protein, 5 aa, Homo sapiens
TCFLR

SEQ ID NO: 20218 - protein, 5 aa, Homo sapiens
KAGGA

SEQ ID NO: 20219 - protein, 5 aa, Homo sapiens
LKYEK

SEQ ID NO: 20220 - protein, 5 aa, Homo sapiens
ATKLG

SEQ ID NO: 20221 - protein, 5 aa, Homo sapiens
CKTLY

SEQ ID NO: 20222 - protein, 5 aa, Homo sapiens
DIFFI

SEQ ID NO: 20223 - protein, 5 aa, Homo sapiens
CHTDT

SEQ ID NO: 20224 - protein, 5 aa, Homo sapiens
PGCGD

SEQ ID NO: 20225 - protein, 5 aa, Homo sapiens
LSDSD

SEQ ID NO: 20226 - protein, 5 aa, Homo sapiens
GGGAN

SEQ ID NO: 20227 - protein, 5 aa, Homo sapiens
FEHAT

SEQ ID NO: 20228 - protein, 5 aa, Homo sapiens
HWTKL

SEQ ID NO: 20229 - protein, 5 aa, Homo sapiens
ARALF

SEQ ID NO: 20230 - protein, 5 aa, Homo sapiens
APGKA

SEQ ID NO: 20231 - protein, 5 aa, Homo sapiens
DRFVR

SEQ ID NO: 20232 - protein, 5 aa, Homo sapiens
ADLSE

SEQ ID NO: 20233 - protein, 5 aa, Homo sapiens
VSKKK

SEQ ID NO: 20234 - protein, 5 aa, Homo sapiens
HKPNF

SEQ ID NO: 20235 - protein, 5 aa, Homo sapiens
TKDPK

SEQ ID NO: 20236 - protein, 5 aa, Homo sapiens
GGLFM

SEQ ID NO: 20237 - protein, 5 aa, Homo sapiens
IAHLE

SEQ ID NO: 20238 - protein, 5 aa, Homo sapiens
PHQLA

SEQ ID NO: 20239 - protein, 5 aa, Homo sapiens
VCFMG

SEQ ID NO: 20240 - protein, 5 aa, Homo sapiens
ALLGP

SEQ ID NO: 20241 - protein, 5 aa, Homo sapiens
LAIGR

SEQ ID NO: 20242 - protein, 5 aa, Homo sapiens
CENDG

SEQ ID NO: 20243 - protein, 5 aa, Homo sapiens
QRGSA

SEQ ID NO: 20244 - protein, 5 aa, Homo sapiens
AQGTL

SEQ ID NO: 20245 - protein, 5 aa, Homo sapiens
SSVPR

SEQ ID NO: 20246 - protein, 5 aa, Homo sapiens
MEGLL

SEQ ID NO: 20247 - protein, 5 aa, Homo sapiens
PCSGD

SEQ ID NO: 20248 - protein, 5 aa, Homo sapiens
GWHIS

SEQ ID NO: 20249 - protein, 5 aa, Homo sapiens
KFYDE

SEQ ID NO: 20250 - protein, 5 aa, Homo sapiens
ADAPE

SEQ ID NO: 20251 - protein, 5 aa, Homo sapiens
REANQ

SEQ ID NO: 20252 - protein, 5 aa, Homo sapiens
KLAQL

SEQ ID NO: 20253 - protein, 5 aa, Homo sapiens
HQGLL

SEQ ID NO: 20254 - protein, 5 aa, Homo sapiens
KGLLH

SEQ ID NO: 20255 - protein, 5 aa, Homo sapiens
ELKCR

SEQ ID NO: 20256 - protein, 5 aa, Homo sapiens
TGFLS

SEQ ID NO: 20257 - protein, 5 aa, Homo sapiens
RRGPL

SEQ ID NO: 20258 - protein, 5 aa, Homo sapiens
KKVEE

SEQ ID NO: 20259 - protein, 5 aa, Homo sapiens
LLKFI

SEQ ID NO: 20260 - protein, 5 aa, Homo sapiens
PTHTC

SEQ ID NO: 20261 - protein, 5 aa, Homo sapiens
SDTSN

SEQ ID NO: 20262 - protein, 5 aa, Homo sapiens
PQPPE

SEQ ID NO: 20263 - protein, 5 aa, Homo sapiens
STGGP

SEQ ID NO: 20264 - protein, 5 aa, Homo sapiens
WLLSI

SEQ ID NO: 20265 - protein, 5 aa, Homo sapiens
PGGGG

SEQ ID NO: 20266 - protein, 5 aa, Homo sapiens
ENVVL

SEQ ID NO: 20267 - protein, 5 aa, Homo sapiens
EPWLS

SEQ ID NO: 20268 - protein, 5 aa, Homo sapiens
NYWDP

SEQ ID NO: 20269 - protein, 5 aa, Homo sapiens
PAGGG

SEQ ID NO: 20270 - protein, 5 aa, Homo sapiens
QGCQV

SEQ ID NO: 20271 - protein, 5 aa, Homo sapiens
RLFQE

SEQ ID NO: 20272 - protein, 5 aa, Homo sapiens
RLFQE

SEQ ID NO: 20273 - protein, 5 aa, Homo sapiens
LHCVY

SEQ ID NO: 20274 - protein, 5 aa, Homo sapiens
RLPET

SEQ ID NO: 20275 - protein, 5 aa, Homo sapiens
VLSSV

SEQ ID NO: 20276 - protein, 5 aa, Homo sapiens
TPSPK

SEQ ID NO: 20277 - protein, 5 aa, Homo sapiens
SLYTQ

SEQ ID NO: 20278 - protein, 5 aa, Homo sapiens
LVDGF

SEQ ID NO: 20279 - protein, 5 aa, Homo sapiens
KKRKK

SEQ ID NO: 20280 - protein, 5 aa, Homo sapiens
VYGTL

SEQ ID NO: 20281 - protein, 5 aa, Homo sapiens
KMPEN

SEQ ID NO: 20282 - protein, 5 aa, Homo sapiens
IEEVD

SEQ ID NO: 20283 - protein, 5 aa, Homo sapiens
QANRK

SEQ ID NO: 20284 - protein, 5 aa, Homo sapiens
LSDSD

SEQ ID NO: 20285 - protein, 5 aa, Homo sapiens
GGGAN

SEQ ID NO: 20286 - protein, 5 aa, Homo sapiens
FEHAT

SEQ ID NO: 20287 - protein, 5 aa, Homo sapiens
GLASW

SEQ ID NO: 20288 - protein, 5 aa, Homo sapiens
GMPMF

SEQ ID NO: 20289 - protein, 5 aa, Homo sapiens
ARALF

SEQ ID NO: 20290 - protein, 5 aa, Homo sapiens
APGKA

SEQ ID NO: 20291 - protein, 5 aa, Homo sapiens
DRFVR

SEQ ID NO: 20292 - protein, 5 aa, Homo sapiens
AWLQS

SEQ ID NO: 20293 - protein, 5 aa, Homo sapiens
HKPNF

SEQ ID NO: 20294 - protein, 5 aa, Homo sapiens
TKDPK

SEQ ID NO: 20295 - protein, 5 aa, Homo sapiens
IAHLE

SEQ ID NO: 20296 - protein, 5 aa, Homo sapiens
PHQLA

SEQ ID NO: 20297 - protein, 5 aa, Homo sapiens
VCFMG

SEQ ID NO: 20298 - protein, 5 aa, Homo sapiens
AQGTL

SEQ ID NO: 20299 - protein, 5 aa, Homo sapiens
SSVPR

SEQ ID NO: 20300 - protein, 5 aa, Homo sapiens
PCSGD

SEQ ID NO: 20301 - protein, 5 aa, Homo sapiens
GWHIS

SEQ ID NO: 20302 - protein, 5 aa, Homo sapiens
ERKSS

SEQ ID NO: 20303 - protein, 5 aa, Homo sapiens
KFYDE

SEQ ID NO: 20304 - protein, 5 aa, Homo sapiens
ADAPE

SEQ ID NO: 20305 - protein, 5 aa, Homo sapiens
REANQ

SEQ ID NO: 20306 - protein, 5 aa, Homo sapiens
KLAQL

SEQ ID NO: 20307 - protein, 5 aa, Homo sapiens
KGLLH

SEQ ID NO: 20308 - protein, 5 aa, Homo sapiens
ELSNN

SEQ ID NO: 20309 - protein, 5 aa, Homo sapiens
HQGPL

SEQ ID NO: 20310 - protein, 5 aa, Homo sapiens
FADDP

SEQ ID NO: 20311 - protein, 5 aa, Homo sapiens
RRGPL

SEQ ID NO: 20312 - protein, 5 aa, Homo sapiens
GEGKK

SEQ ID NO: 20313 - protein, 5 aa, Homo sapiens
PTHTC

SEQ ID NO: 20314 - protein, 5 aa, Homo sapiens
LPPPR

SEQ ID NO: 20315 - protein, 5 aa, Homo sapiens
SDTSN

SEQ ID NO: 20316 - protein, 5 aa, Homo sapiens
IPRTK

SEQ ID NO: 20317 - protein, 5 aa, Homo sapiens
STGGP

SEQ ID NO: 20318 - protein, 5 aa, Homo sapiens
ISELP

SEQ ID NO: 20319 - protein, 5 aa, Homo sapiens
PVPGG

SEQ ID NO: 20320 - protein, 5 aa, Homo sapiens
WLLSI

SEQ ID NO: 20321 - protein, 5 aa, Homo sapiens
IKAEI

SEQ ID NO: 20322 - protein, 5 aa, Homo sapiens
PGGGG

SEQ ID NO: 20323 - protein, 5 aa, Homo sapiens
ENKPT

SEQ ID NO: 20324 - protein, 5 aa, Homo sapiens
GVNHR

SEQ ID NO: 20325 - protein, 5 aa, Homo sapiens
AVMVG

SEQ ID NO: 20326 - protein, 5 aa, Homo sapiens
EPWLS

SEQ ID NO: 20327 - protein, 5 aa, Homo sapiens
GIIAL

SEQ ID NO: 20328 - protein, 5 aa, Homo sapiens
GAFAL

SEQ ID NO: 20329 - protein, 5 aa, Homo sapiens
NYWDP

SEQ ID NO: 20330 - protein, 5 aa, Homo sapiens
SDSED

SEQ ID NO: 20331 - protein, 5 aa, Homo sapiens
AEALK

SEQ ID NO: 20332 - protein, 5 aa, Homo sapiens
YRISA

SEQ ID NO: 20333 - protein, 5 aa, Homo sapiens
IEQTR

SEQ ID NO: 20334 - protein, 5 aa, Homo sapiens
LGGGA

SEQ ID NO: 20335 - protein, 5 aa, Homo sapiens
KGTLL

SEQ ID NO: 20336 - protein, 5 aa, Homo sapiens
PGQSQ

SEQ ID NO: 20337 - protein, 5 aa, Homo sapiens
QGCQV

SEQ ID NO: 20338 - protein, 5 aa, Homo sapiens
VSLTA

SEQ ID NO: 20339 - protein, 5 aa, Homo sapiens
RLPET

SEQ ID NO: 20340 - protein, 5 aa, Homo sapiens
TPSPK

SEQ ID NO: 20341 - protein, 5 aa, Homo sapiens
SSSTL

SEQ ID NO: 20342 - protein, 5 aa, Homo sapiens
PMHSN

SEQ ID NO: 20343 - protein, 5 aa, Homo sapiens
PCLCL

SEQ ID NO: 20344 - protein, 5 aa, Homo sapiens
SLYTQ

SEQ ID NO: 20345 - protein, 5 aa, Homo sapiens
AGIQT

SEQ ID NO: 20346 - protein, 5 aa, Homo sapiens
PQMSS

SEQ ID NO: 20347 - protein, 5 aa, Homo sapiens
LVDGF

SEQ ID NO: 20348 - protein, 5 aa, Homo sapiens
LSSLI

SEQ ID NO: 20349 - protein, 5 aa, Homo sapiens
REEYR

SEQ ID NO: 20350 - protein, 5 aa, Homo sapiens
AGMRR

SEQ ID NO: 20351 - protein, 5 aa, Homo sapiens
RLQWG

SEQ ID NO: 20352 - protein, 5 aa, Homo sapiens
DLGFL

SEQ ID NO: 20353 - protein, 5 aa, Homo sapiens
RNSGP

SEQ ID NO: 20354 - protein, 5 aa, Homo sapiens
VVCNT

SEQ ID NO: 20355 - protein, 5 aa, Homo sapiens
QKHSS

SEQ ID NO: 20356 - protein, 5 aa, Homo sapiens
NFLPL

SEQ ID NO: 20357 - protein, 5 aa, Homo sapiens
EVGPV

SEQ ID NO: 20358 - protein, 5 aa, Homo sapiens
LQNHL

SEQ ID NO: 20359 - protein, 5 aa, Homo sapiens
GSPEL

SEQ ID NO: 20360 - protein, 5 aa, Homo sapiens
ALNTV

SEQ ID NO: 20361 - protein, 5 aa, Homo sapiens
KKRKK

SEQ ID NO: 20362 - protein, 5 aa, Homo sapiens
HPAAF

SEQ ID NO: 20363 - protein, 5 aa, Homo sapiens
PLRTA

SEQ ID NO: 20364 - protein, 5 aa, Homo sapiens
KMPEN

SEQ ID NO: 20365 - protein, 5 aa, Homo sapiens
EMSST

SEQ ID NO: 20366 - protein, 5 aa, Homo sapiens
IEEVD

SEQ ID NO: 20367 - protein, 5 aa, Homo sapiens
LQQKQ

SEQ ID NO: 20368 - protein, 5 aa, Homo sapiens
DGEAE

SEQ ID NO: 20369 - protein, 5 aa, Homo sapiens
ESCRR

SEQ ID NO: 20370 - protein, 5 aa, Homo sapiens
AKALK

SEQ ID NO: 20371 - protein, 5 aa, Homo sapiens
REELG

SEQ ID NO: 20372 - protein, 5 aa, Homo sapiens
SQHNP

SEQ ID NO: 20373 - protein, 5 aa, Homo sapiens
TRPHS

SEQ ID NO: 20374 - protein, 5 aa, Homo sapiens
LWLLH

SEQ ID NO: 20375 - protein, 5 aa, Homo sapiens
LCSKP

SEQ ID NO: 20376 - protein, 5 aa, Homo sapiens
SEITE

SEQ ID NO: 20377 - protein, 5 aa, Homo sapiens
MPWHL

SEQ ID NO: 20378 - protein, 5 aa, Homo sapiens
STRPW

SEQ ID NO: 20379 - protein, 5 aa, Homo sapiens
GLYTP

SEQ ID NO: 20380 - protein, 5 aa, Homo sapiens
PQSAL

SEQ ID NO: 20381 - protein, 5 aa, Homo sapiens
GPPLP

SEQ ID NO: 20382 - protein, 5 aa, Homo sapiens
MNLEF

SEQ ID NO: 20383 - protein, 5 aa, Homo sapiens
SRPRE

SEQ ID NO: 20384 - protein, 5 aa, Homo sapiens
ELSNN

SEQ ID NO: 20385 - protein, 5 aa, Homo sapiens
NGPPL

SEQ ID NO: 20386 - protein, 5 aa, Homo sapiens
GEDEC

SEQ ID NO: 20387 - protein, 5 aa, Homo sapiens
ESHSL

SEQ ID NO: 20388 - protein, 5 aa, Homo sapiens
GSSNQ

SEQ ID NO: 20389 - protein, 5 aa, Homo sapiens
LPPPR

SEQ ID NO: 20390 - protein, 5 aa, Homo sapiens
PTDWE

SEQ ID NO: 20391 - protein, 5 aa, Homo sapiens
YRWGN

SEQ ID NO: 20392 - protein, 5 aa, Homo sapiens
RPYSQ

SEQ ID NO: 20393 - protein, 5 aa, Homo sapiens
LLLRP

SEQ ID NO: 20394 - protein, 5 aa, Homo sapiens
DKKHT

SEQ ID NO: 20395 - protein, 5 aa, Homo sapiens
PPQKL

SEQ ID NO: 20396 - protein, 5 aa, Homo sapiens
KVPSS

SEQ ID NO: 20397 - protein, 5 aa, Homo sapiens
ISELP

SEQ ID NO: 20398 - protein, 5 aa, Homo sapiens
VPAES

SEQ ID NO: 20399 - protein, 5 aa, Homo sapiens
PVPGG

SEQ ID NO: 20400 - protein, 5 aa, Homo sapiens
EKEDS

SEQ ID NO: 20401 - protein, 5 aa, Homo sapiens
ENKPT

SEQ ID NO: 20402 - protein, 5 aa, Homo sapiens
ITCKA

SEQ ID NO: 20403 - protein, 5 aa, Homo sapiens
VHSLR

SEQ ID NO: 20404 - protein, 5 aa, Homo sapiens
AVMVG

SEQ ID NO: 20405 - protein, 5 aa, Homo sapiens
TREPL

SEQ ID NO: 20406 - protein, 5 aa, Homo sapiens
GIIAL

SEQ ID NO: 20407 - protein, 5 aa, Homo sapiens
TACKV

SEQ ID NO: 20408 - protein, 5 aa, Homo sapiens
GAFAL

SEQ ID NO: 20409 - protein, 5 aa, Homo sapiens
YRISA

SEQ ID NO: 20410 - protein, 5 aa, Homo sapiens
IEQTR

SEQ ID NO: 20411 - protein, 5 aa, Homo sapiens
MWCMY

SEQ ID NO: 20412 - protein, 5 aa, Homo sapiens
RTVYS

SEQ ID NO: 20413 - protein, 5 aa, Homo sapiens
RGSHL

SEQ ID NO: 20414 - protein, 5 aa, Homo sapiens
LGGGA

SEQ ID NO: 20415 - protein, 5 aa, Homo sapiens
DCGQL

SEQ ID NO: 20416 - protein, 5 aa, Homo sapiens
STEGA

SEQ ID NO: 20417 - protein, 5 aa, Homo sapiens
IKIFD

SEQ ID NO: 20418 - protein, 5 aa, Homo sapiens
ILKHK

SEQ ID NO: 20419 - protein, 5 aa, Homo sapiens
KITVW

SEQ ID NO: 20420 - protein, 5 aa, Homo sapiens
PMHSN

SEQ ID NO: 20421 - protein, 5 aa, Homo sapiens
AGIQT

SEQ ID NO: 20422 - protein, 5 aa, Homo sapiens
REEYR

SEQ ID NO: 20423 - protein, 5 aa, Homo sapiens
LLDSP

SEQ ID NO: 20424 - protein, 5 aa, Homo sapiens
RLQWG

SEQ ID NO: 20425 - protein, 5 aa, Homo sapiens
RNSGP

SEQ ID NO: 20426 - protein, 5 aa, Homo sapiens
VVCNT

SEQ ID NO: 20427 - protein, 5 aa, Homo sapiens
HLLYK

SEQ ID NO: 20428 - protein, 5 aa, Homo sapiens
GSPEL

SEQ ID NO: 20429 - protein, 5 aa, Homo sapiens
GLTQS

SEQ ID NO: 20430 - protein, 5 aa, Homo sapiens
YCIGG

SEQ ID NO: 20431 - protein, 5 aa, Homo sapiens
VDVET

SEQ ID NO: 20432 - protein, 5 aa, Homo sapiens
SWRAA

SEQ ID NO: 20433 - protein, 5 aa, Homo sapiens
TETLD

SEQ ID NO: 20434 - protein, 5 aa, Homo sapiens
VIRRL

SEQ ID NO: 20435 - protein, 5 aa, Homo sapiens
WQQHH

SEQ ID NO: 20436 - protein, 5 aa, Homo sapiens
HPAAF

SEQ ID NO: 20437 - protein, 5 aa, Homo sapiens
PLRTA

SEQ ID NO: 20438 - protein, 5 aa, Homo sapiens
FLAQK

SEQ ID NO: 20439 - protein, 5 aa, Homo sapiens
AEEEA

SEQ ID NO: 20440 - protein, 5 aa, Homo sapiens
EMSST

SEQ ID NO: 20441 - protein, 5 aa, Homo sapiens
DGEAE

SEQ ID NO: 20442 - protein, 5 aa, Homo sapiens
KCISG

SEQ ID NO: 20443 - protein, 5 aa, Homo sapiens
ESCRR

SEQ ID NO: 20444 - protein, 5 aa, Homo sapiens
REELG

SEQ ID NO: 20445 - protein, 5 aa, Homo sapiens
QALQL

SEQ ID NO: 20446 - protein, 5 aa, Homo sapiens
LCSKP

SEQ ID NO: 20447 - protein, 5 aa, Homo sapiens
STRPW

SEQ ID NO: 20448 - protein, 5 aa, Homo sapiens
GPPLP

SEQ ID NO: 20449 - protein, 5 aa, Homo sapiens
SRPRE

SEQ ID NO: 20450 - protein, 5 aa, Homo sapiens
NGPPL

SEQ ID NO: 20451 - protein, 5 aa, Homo sapiens
GEDEC

SEQ ID NO: 20452 - protein, 5 aa, Homo sapiens
ESHSL

SEQ ID NO: 20453 - protein, 5 aa, Homo sapiens
PTDWE

SEQ ID NO: 20454 - protein, 5 aa, Homo sapiens
LLLRP

SEQ ID NO: 20455 - protein, 5 aa, Homo sapiens
PPQKL

SEQ ID NO: 20456 - protein, 5 aa, Homo sapiens
VPAES

SEQ ID NO: 20457 - protein, 5 aa, Homo sapiens
GPMQH

SEQ ID NO: 20458 - protein, 5 aa, Homo sapiens
EKEDS

SEQ ID NO: 20459 - protein, 5 aa, Homo sapiens
TREPL

SEQ ID NO: 20460 - protein, 5 aa, Homo sapiens
TACKV

SEQ ID NO: 20461 - protein, 5 aa, Homo sapiens
MWCMY

SEQ ID NO: 20462 - protein, 5 aa, Homo sapiens
RGSHL

SEQ ID NO: 20463 - protein, 5 aa, Homo sapiens
IKIFD

SEQ ID NO: 20464 - protein, 5 aa, Homo sapiens
ILKHK

SEQ ID NO: 20465 - protein, 5 aa, Homo sapiens
KITVW

SEQ ID NO: 20466 - protein, 5 aa, Homo sapiens
HLLYK

SEQ ID NO: 20467 - protein, 5 aa, Homo sapiens
GLTQS

SEQ ID NO: 20468 - protein, 5 aa, Homo sapiens
YCIGG

SEQ ID NO: 20469 - protein, 5 aa, Homo sapiens
VDVET

SEQ ID NO: 20470 - protein, 5 aa, Homo sapiens
SWRAA

SEQ ID NO: 20471 - protein, 5 aa, Homo sapiens
TETLD

SEQ ID NO: 20472 - protein, 5 aa, Homo sapiens
VPMEI

SEQ ID NO: 20473 - protein, 5 aa, Homo sapiens
LMGWE

SEQ ID NO: 20474 - protein, 5 aa, Homo sapiens
WEWGK

SEQ ID NO: 20475 - protein, 5 aa, Homo sapiens
FFCKK

SEQ ID NO: 20476 - protein, 5 aa, Homo sapiens
RNCKS

SEQ ID NO: 20477 - protein, 5 aa, Homo sapiens
ILTSA

SEQ ID NO: 20478 - protein, 5 aa, Homo sapiens
FLAQK

SEQ ID NO: 20479 - protein, 5 aa, Homo sapiens
HKKFE

SEQ ID NO: 20480 - protein, 5 aa, Homo sapiens
ITFTA

SEQ ID NO: 20481 - protein, 5 aa, Homo sapiens
KILSC

SEQ ID NO: 20482 - protein, 5 aa, Homo sapiens
CHCSS

SEQ ID NO: 20483 - protein, 5 aa, Homo sapiens
EKGPE

SEQ ID NO: 20484 - protein, 5 aa, Homo sapiens
ILMKK

SEQ ID NO: 20485 - protein, 5 aa, Homo sapiens
SPLAT

SEQ ID NO: 20486 - protein, 5 aa, Homo sapiens
VKVSY

SEQ ID NO: 20487 - protein, 5 aa, Homo sapiens
IIPKI

SEQ ID NO: 20488 - protein, 5 aa, Homo sapiens
KEYFI

SEQ ID NO: 20489 - protein, 5 aa, Homo sapiens
RSSYR

SEQ ID NO: 20490 - protein, 5 aa, Homo sapiens
KHDEL

SEQ ID NO: 20491 - protein, 5 aa, Homo sapiens
DEEDD

SEQ ID NO: 20492 - protein, 5 aa, Homo sapiens
EGIWA

SEQ ID NO: 20493 - protein, 5 aa, Homo sapiens
GALGF

SEQ ID NO: 20494 - protein, 5 aa, Homo sapiens
KGLQP

SEQ ID NO: 20495 - protein, 5 aa, Homo sapiens
LEDTE

SEQ ID NO: 20496 - protein, 5 aa, Homo sapiens
QNNLT

SEQ ID NO: 20497 - protein, 5 aa, Homo sapiens
PHKQQ

SEQ ID NO: 20498 - protein, 5 aa, Homo sapiens
PCIAL

SEQ ID NO: 20499 - protein, 5 aa, Homo sapiens
DRRKA

SEQ ID NO: 20500 - protein, 5 aa, Homo sapiens
QAPPP

SEQ ID NO: 20501 - protein, 5 aa, Homo sapiens
AELNF

SEQ ID NO: 20502 - protein, 5 aa, Homo sapiens
ISLQD

SEQ ID NO: 20503 - protein, 5 aa, Homo sapiens
RILVF

SEQ ID NO: 20504 - protein, 5 aa, Homo sapiens
AGYWD

SEQ ID NO: 20505 - protein, 5 aa, Homo sapiens
TGEKP

SEQ ID NO: 20506 - protein, 5 aa, Homo sapiens
LMSEF

SEQ ID NO: 20507 - protein, 5 aa, Homo sapiens
HATRN

SEQ ID NO: 20508 - protein, 5 aa, Homo sapiens
FKVHP

SEQ ID NO: 20509 - protein, 5 aa, Homo sapiens
DSETY

SEQ ID NO: 20510 - protein, 5 aa, Homo sapiens
LYERD

SEQ ID NO: 20511 - protein, 5 aa, Homo sapiens
TSVGF

SEQ ID NO: 20512 - protein, 5 aa, Homo sapiens
CRYFT

SEQ ID NO: 20513 - protein, 5 aa, Homo sapiens
LDPKS

SEQ ID NO: 20514 - protein, 5 aa, Homo sapiens
MVQIG

SEQ ID NO: 20515 - protein, 5 aa, Homo sapiens
YKQVT

SEQ ID NO: 20516 - protein, 5 aa, Homo sapiens
QQNEQ

SEQ ID NO: 20517 - protein, 5 aa, Homo sapiens
GDLSA

SEQ ID NO: 20518 - protein, 5 aa, Homo sapiens
GLRLQ

SEQ ID NO: 20519 - protein, 5 aa, Homo sapiens
LVSCT

SEQ ID NO: 20520 - protein, 5 aa, Homo sapiens
TSDSD

SEQ ID NO: 20521 - protein, 5 aa, Homo sapiens
APEQP

SEQ ID NO: 20522 - protein, 5 aa, Homo sapiens
RELQS

SEQ ID NO: 20523 - protein, 5 aa, Homo sapiens
KSGTM

SEQ ID NO: 20524 - protein, 5 aa, Homo sapiens
GSYFD

SEQ ID NO: 20525 - protein, 5 aa, Homo sapiens
SRLPR

SEQ ID NO: 20526 - protein, 5 aa, Homo sapiens
EKKAL

SEQ ID NO: 20527 - protein, 5 aa, Homo sapiens
EAHTE

SEQ ID NO: 20528 - protein, 5 aa, Homo sapiens
ASAQS

SEQ ID NO: 20529 - protein, 5 aa, Homo sapiens
SNSEN

SEQ ID NO: 20530 - protein, 5 aa, Homo sapiens
NLCLT

SEQ ID NO: 20531 - protein, 5 aa, Homo sapiens
YEKNI

SEQ ID NO: 20532 - protein, 5 aa, Homo sapiens
SSNLP

SEQ ID NO: 20533 - protein, 5 aa, Homo sapiens
CLVAR

SEQ ID NO: 20534 - protein, 5 aa, Homo sapiens
LRARK

SEQ ID NO: 20535 - protein, 5 aa, Homo sapiens
ARCYS

SEQ ID NO: 20536 - protein, 5 aa, Homo sapiens
LSKVE

SEQ ID NO: 20537 - protein, 5 aa, Homo sapiens
ESGGF

SEQ ID NO: 20538 - protein, 5 aa, Homo sapiens
VETSL

SEQ ID NO: 20539 - protein, 5 aa, Homo sapiens
LQRQY

SEQ ID NO: 20540 - protein, 5 aa, Homo sapiens
GVKRK

SEQ ID NO: 20541 - protein, 5 aa, Homo sapiens
EUPSN

SEQ ID NO: 20542 - protein, 5 aa, Homo sapiens
NLKRL

SEQ ID NO: 20543 - protein, 5 aa, Homo sapiens
GPSCA

SEQ ID NO: 20544 - protein, 5 aa, Homo sapiens
LCHLH

SEQ ID NO: 20545 - protein, 5 aa, Homo sapiens
PEPAS

SEQ ID NO: 20546 - protein, 5 aa, Homo sapiens
KVLRH

SEQ ID NO: 20547 - protein, 5 aa, Homo sapiens
TYLNN

SEQ ID NO: 20548 - protein, 5 aa, Homo sapiens
KKYLS

SEQ ID NO: 20549 - protein, 5 aa, Homo sapiens
FQENF

SEQ ID NO: 20550 - protein, 5 aa, Homo sapiens
KIAAF

SEQ ID NO: 20551 - protein, 5 aa, Homo sapiens
PLLQP

SEQ ID NO: 20552 - protein, 5 aa, Homo sapiens
LSSAK

SEQ ID NO: 20553 - protein, 5 aa, Homo sapiens
PNYFI

SEQ ID NO: 20554 - protein, 5 aa, Homo sapiens
PLRTL

SEQ ID NO: 20555 - protein, 5 aa, Homo sapiens
EMGKR

SEQ ID NO: 20556 - protein, 5 aa, Homo sapiens
RISLR

SEQ ID NO: 20557 - protein, 5 aa, Homo sapiens
FKSKK

SEQ ID NO: 20558 - protein, 5 aa, Homo sapiens
KMLLK

SEQ ID NO: 20559 - protein, 5 aa, Homo sapiens
GAHSV

SEQ ID NO: 20560 - protein, 5 aa, Homo sapiens
NQSVV

SEQ ID NO: 20561 - protein, 5 aa, Homo sapiens
EGTEV

SEQ ID NO: 20562 - protein, 5 aa, Homo sapiens
KTTLD

SEQ ID NO: 20563 - protein, 5 aa, Homo sapiens
ISPLH

SEQ ID NO: 20564 - protein, 5 aa, Homo sapiens
GGEES

SEQ ID NO: 20565 - protein, 5 aa, Homo sapiens
YGSGH

SEQ ID NO: 20566 - protein, 5 aa, Homo sapiens
PDLGF

SEQ ID NO: 20567 - protein, 5 aa, Homo sapiens
RVPEA

SEQ ID NO: 20568 - protein, 5 aa, Homo sapiens
TQDSK

SEQ ID NO: 20569 - protein, 5 aa, Homo sapiens
LQQIK

SEQ ID NO: 20570 - protein, 5 aa, Homo sapiens
FVDTC

SEQ ID NO: 20571 - protein, 5 aa, Homo sapiens
SPKTN

SEQ ID NO: 20572 - protein, 5 aa, Homo sapiens
KHRKK

SEQ ID NO: 20573 - protein, 5 aa, Homo sapiens
SGISM

SEQ ID NO: 20574 - protein, 5 aa, Homo sapiens
SNKPI

SEQ ID NO: 20575 - protein, 5 aa, Homo sapiens
SEAES

SEQ ID NO: 20576 - protein, 5 aa, Homo sapiens
VKAYS

SEQ ID NO: 20577 - protein, 5 aa, Homo sapiens
EALCK

SEQ ID NO: 20578 - protein, 5 aa, Homo sapiens
QRFLD

SEQ ID NO: 20579 - protein, 5 aa, Homo sapiens
KAGKL

SEQ ID NO: 20580 - protein, 5 aa, Homo sapiens
IKKRL

SEQ ID NO: 20581 - protein, 5 aa, Homo sapiens
STAHG

SEQ ID NO: 20582 - protein, 5 aa, Homo sapiens
SFHLS

SEQ ID NO: 20583 - protein, 5 aa, Homo sapiens
NQPGP

SEQ ID NO: 20584 - protein, 5 aa, Homo sapiens
YQLLT

SEQ ID NO: 20585 - protein, 5 aa, Homo sapiens
LHPRG

SEQ ID NO: 20586 - protein, 5 aa, Homo sapiens
KEKID

SEQ ID NO: 20587 - protein, 5 aa, Homo sapiens
KILDL

SEQ ID NO: 20588 - protein, 5 aa, Homo sapiens
GPNCA

SEQ ID NO: 20589 - protein, 5 aa, Homo sapiens
ELKSA

SEQ ID NO: 20590 - protein, 5 aa, Homo sapiens
IHIAY

SEQ ID NO: 20591 - protein, 5 aa, Homo sapiens
FFFPF

SEQ ID NO: 20592 - protein, 5 aa, Homo sapiens
NISSC

SEQ ID NO: 20593 - protein, 5 aa, Homo sapiens
LRRYP

SEQ ID NO: 20594 - protein, 5 aa, Homo sapiens
LDMMS

SEQ ID NO: 20595 - protein, 5 aa, Homo sapiens
MRMPL

SEQ ID NO: 20596 - protein, 5 aa, Homo sapiens
QLSPQ

SEQ ID NO: 20597 - protein, 5 aa, Homo sapiens
YLVSC

SEQ ID NO: 20598 - protein, 5 aa, Homo sapiens
PIFHH

SEQ ID NO: 20599 - protein, 5 aa, Homo sapiens
KAKLT

SEQ ID NO: 20600 - protein, 5 aa, Homo sapiens
EVQRK

SEQ ID NO: 20601 - protein, 5 aa, Homo sapiens
QPGAG

SEQ ID NO: 20602 - protein, 5 aa, Homo sapiens
RETFF

SEQ ID NO: 20603 - protein, 5 aa, Homo sapiens
LCRLS

SEQ ID NO: 20604 - protein, 5 aa, Homo sapiens
QETQI

SEQ ID NO: 20605 - protein, 5 aa, Homo sapiens
TLDFK

SEQ ID NO: 20606 - protein, 5 aa, Homo sapiens
GIHLC

SEQ ID NO: 20607 - protein, 5 aa, Homo sapiens
MTPFV

SEQ ID NO: 20608 - protein, 5 aa, Homo sapiens
RELEP

SEQ ID NO: 20609 - protein, 5 aa, Homo sapiens
FTKQR

SEQ ID NO: 20610 - protein, 5 aa, Homo sapiens
VFQIP

SEQ ID NO: 20611 - protein, 5 aa, Homo sapiens
SYQNT

SEQ ID NO: 20612 - protein, 5 aa, Homo sapiens
LEPGD

SEQ ID NO: 20613 - protein, 5 aa, Homo sapiens
EHDGT

SEQ ID NO: 20614 - protein, 5 aa, Homo sapiens
AAEAP

SEQ ID NO: 20615 - protein, 5 aa, Homo sapiens
SHECC

SEQ ID NO: 20616 - protein, 5 aa, Homo sapiens
TPPNL

SEQ ID NO: 20617 - protein, 5 aa, Homo sapiens
GPCQC

SEQ ID NO: 20618 - protein, 5 aa, Homo sapiens
KSIPT

SEQ ID NO: 20619 - protein, 5 aa, Homo sapiens
EPHLF

SEQ ID NO: 20620 - protein, 5 aa, Homo sapiens
YSQRY

SEQ ID NO: 20621 - protein, 5 aa, Homo sapiens
LRRFE

SEQ ID NO: 20622 - protein, 5 aa, Homo sapiens
GINVV

SEQ ID NO: 20623 - protein, 5 aa, Homo sapiens
IPPTV

SEQ ID NO: 20624 - protein, 5 aa, Homo sapiens
PSMRN

SEQ ID NO: 20625 - protein, 5 aa, Homo sapiens
LFRRT

SEQ ID NO: 20626 - protein, 5 aa, Homo sapiens
FSNTF

SEQ ID NO: 20627 - protein, 5 aa, Homo sapiens
FQVTS

SEQ ID NO: 20628 - protein, 5 aa, Homo sapiens
PGTGP

SEQ ID NO: 20629 - protein, 5 aa, Homo sapiens
SRPPQ

SEQ ID NO: 20630 - protein, 5 aa, Homo sapiens
HKKQH

SEQ ID NO: 20631 - protein, 5 aa, Homo sapiens
KESHS

SEQ ID NO: 20632 - protein, 5 aa, Homo sapiens
QYLGI

SEQ ID NO: 20633 - protein, 5 aa, Homo sapiens
RPLGF

SEQ ID NO: 20634 - protein, 5 aa, Homo sapiens
YDDIN

SEQ ID NO: 20635 - protein, 5 aa, Homo sapiens
HVSSD

SEQ ID NO: 20636 - protein, 5 aa, Homo sapiens
GGLAK

SEQ ID NO: 20637 - protein, 5 aa, Homo sapiens
CQLSE

SEQ ID NO: 20638 - protein, 5 aa, Homo sapiens
KVTLS

SEQ ID NO: 20639 - protein, 5 aa, Homo sapiens
LSESC

SEQ ID NO: 20640 - protein, 5 aa, Homo sapiens
VQESV

SEQ ID NO: 20641 - protein, 5 aa, Homo sapiens
KALPQ

SEQ ID NO: 20642 - protein, 5 aa, Homo sapiens
TEPSD

SEQ ID NO: 20643 - protein, 5 aa, Homo sapiens
LHENV

SEQ ID NO: 20644 - protein, 5 aa, Homo sapiens
SSESS

SEQ ID NO: 20645 - protein, 5 aa, Homo sapiens
RDGCY

SEQ ID NO: 20646 - protein, 5 aa, Homo sapiens
NGASA

SEQ ID NO: 20647 - protein, 5 aa, Homo sapiens
WTAWV

SEQ ID NO: 20648 - protein, 5 aa, Homo sapiens
MEAVM

SEQ ID NO: 20649 - protein, 5 aa, Homo sapiens
TMCSP

SEQ ID NO: 20650 - protein, 5 aa, Homo sapiens
RETVA

SEQ ID NO: 20651 - protein, 5 aa, Homo sapiens
DKGYS

SEQ ID NO: 20652 - protein, 5 aa, Homo sapiens
LPSPD

SEQ ID NO: 20653 - protein, 5 aa, Homo sapiens
IKQEP

SEQ ID NO: 20654 - protein, 5 aa, Homo sapiens
EMTDV

SEQ ID NO: 20655 - protein, 5 aa, Homo sapiens
PGPPK

SEQ ID NO: 20656 - protein, 5 aa, Homo sapiens
VESNV

SEQ ID NO: 20657 - protein, 5 aa, Homo sapiens
ALAST

SEQ ID NO: 20658 - protein, 5 aa, Homo sapiens
FSSFV

SEQ ID NO: 20659 - protein, 5 aa, Homo sapiens
AQTRK

SEQ ID NO: 20660 - protein, 5 aa, Homo sapiens
SGIPK

SEQ ID NO: 20661 - protein, 5 aa, Homo sapiens
QTKLK

SEQ ID NO: 20662 - protein, 5 aa, Homo sapiens
STHSI

SEQ ID NO: 20663 - protein, 5 aa, Homo sapiens
FYSHS

SEQ ID NO: 20664 - protein, 5 aa, Homo sapiens
GQPRS

SEQ ID NO: 20665 - protein, 5 aa, Homo sapiens
ILQKA

SEQ ID NO: 20666 - protein, 5 aa, Homo sapiens
TSHSA

SEQ ID NO: 20667 - protein, 5 aa, Homo sapiens
AGASL

SEQ ID NO: 20668 - protein, 5 aa, Homo sapiens
ATGLF

SEQ ID NO: 20669 - protein, 5 aa, Homo sapiens
TPLNG

SEQ ID NO: 20670 - protein, 5 aa, Homo sapiens
LNYIC

SEQ ID NO: 20671 - protein, 5 aa, Homo sapiens
ALVQM

SEQ ID NO: 20672 - protein, 5 aa, Homo sapiens
AALGL

SEQ ID NO: 20673 - protein, 5 aa, Homo sapiens
EALKN

SEQ ID NO: 20674 - protein, 5 aa, Homo sapiens
TIGTR

SEQ ID NO: 20675 - protein, 5 aa, Homo sapiens
FTGTW

SEQ ID NO: 20676 - protein, 5 aa, Homo sapiens
GSLRV

SEQ ID NO: 20677 - protein, 5 aa, Homo sapiens
STVKT

SEQ ID NO: 20678 - protein, 5 aa, Homo sapiens
LKVAI

SEQ ID NO: 20679 - protein, 5 aa, Homo sapiens
PNQMH

SEQ ID NO: 20680 - protein, 5 aa, Homo sapiens
LRGDV

SEQ ID NO: 20681 - protein, 5 aa, Homo sapiens
RRGLI

SEQ ID NO: 20682 - protein, 5 aa, Homo sapiens
KDYRS

SEQ ID NO: 20683 - protein, 5 aa, Homo sapiens
KLKKA

SEQ ID NO: 20684 - protein, 5 aa, Homo sapiens
YNIMD

SEQ ID NO: 20685 - protein, 5 aa, Homo sapiens
LIRNR

SEQ ID NO: 20686 - protein, 5 aa, Homo sapiens
KAAPQ

SEQ ID NO: 20687 - protein, 5 aa, Homo sapiens
WPGIV

SEQ ID NO: 20688 - protein, 5 aa, Homo sapiens
PGTES

SEQ ID NO: 20689 - protein, 5 aa, Homo sapiens
SSYPQ

SEQ ID NO: 20690 - protein, 5 aa, Homo sapiens
KGFHV

SEQ ID NO: 20691 - protein, 5 aa, Homo sapiens
HEQCK

SEQ ID NO: 20692 - protein, 5 aa, Homo sapiens
ACVEK

SEQ ID NO: 20693 - protein, 5 aa, Homo sapiens
KNIGL

SEQ ID NO: 20694 - protein, 5 aa, Homo sapiens
LQDLQ

SEQ ID NO: 20695 - protein, 5 aa, Homo sapiens
FPKKK

SEQ ID NO: 20696 - protein, 5 aa, Homo sapiens
LSEVA

SEQ ID NO: 20697 - protein, 5 aa, Homo sapiens
TPHPP

SEQ ID NO: 20698 - protein, 5 aa, Homo sapiens
FEFQV

SEQ ID NO: 20699 - protein, 5 aa, Homo sapiens
GPATL

SEQ ID NO: 20700 - protein, 5 aa, Homo sapiens
RKKIS

SEQ ID NO: 20701 - protein, 5 aa, Homo sapiens
ESKGS

SEQ ID NO: 20702 - protein, 5 aa, Homo sapiens
PQGMS

SEQ ID NO: 20703 - protein, 5 aa, Homo sapiens
PDSWV

SEQ ID NO: 20704 - protein, 5 aa, Homo sapiens
SYAAG

SEQ ID NO: 20705 - protein, 5 aa, Homo sapiens
NALSA

SEQ ID NO: 20706 - protein, 5 aa, Homo sapiens
HPPPL

SEQ ID NO: 20707 - protein, 5 aa, Homo sapiens
NQERC

SEQ ID NO: 20708 - protein, 5 aa, Homo sapiens
DHGEN

SEQ ID NO: 20709 - protein, 5 aa, Homo sapiens
GRGKH

SEQ ID NO: 20710 - protein, 5 aa, Homo sapiens
LKETI

SEQ ID NO: 20711 - protein, 5 aa, Homo sapiens
IPAHH

SEQ ID NO: 20712 - protein, 5 aa, Homo sapiens
LLLQV

SEQ ID NO: 20713 - protein, 5 aa, Homo sapiens
WKKQN

SEQ ID NO: 20714 - protein, 5 aa, Homo sapiens
NYALN

SEQ ID NO: 20715 - protein, 5 aa, Homo sapiens
EYGCV

SEQ ID NO: 20716 - protein, 5 aa, Homo sapiens
YVVFL

SEQ ID NO: 20717 - protein, 5 aa, Homo sapiens
AAWMR

SEQ ID NO: 20718 - protein, 5 aa, Homo sapiens
FCGSS

SEQ ID NO: 20719 - protein, 5 aa, Homo sapiens
PRHRF

SEQ ID NO: 20720 - protein, 5 aa, Homo sapiens
KKKKK

SEQ ID NO: 20721 - protein, 5 aa, Homo sapiens
VPPQW

SEQ ID NO: 20722 - protein, 5 aa, Homo sapiens
MERKL

SEQ ID NO: 20723 - protein, 5 aa, Homo sapiens
SSAGK

SEQ ID NO: 20724 - protein, 5 aa, Homo sapiens
PETEP

SEQ ID NO: 20725 - protein, 5 aa, Homo sapiens
PLGKP

SEQ ID NO: 20726 - protein, 5 aa, Homo sapiens
KTSFL

SEQ ID NO: 20727 - protein, 5 aa, Homo sapiens
NSDVC

SEQ ID NO: 20728 - protein, 5 aa, Homo sapiens
CAVPR

SEQ ID NO: 20729 - protein, 5 aa, Homo sapiens
FGKKK

SEQ ID NO: 20730 - protein, 5 aa, Homo sapiens
NQSAP

SEQ ID NO: 20731 - protein, 5 aa, Homo sapiens
GRAKA

SEQ ID NO: 20732 - protein, 5 aa, Homo sapiens
PCYYA

SEQ ID NO: 20733 - protein, 5 aa, Homo sapiens
NRGEC

SEQ ID NO: 20734 - protein, 5 aa, Homo sapiens
YSTPP

SEQ ID NO: 20735 - protein, 5 aa, Homo sapiens
DNFPL

SEQ ID NO: 20736 - protein, 5 aa, Homo sapiens
NSYSP

SEQ ID NO: 20737 - protein, 5 aa, Homo sapiens
YNYPP

SEQ ID NO: 20738 - protein, 5 aa, Homo sapiens
YNLPP

SEQ ID NO: 20739 - protein, 5 aa, Homo sapiens
YSYPP

SEQ ID NO: 20740 - protein, 5 aa, Homo sapiens
NSYPP

SEQ ID NO: 20741 - protein, 5 aa, Homo sapiens
SNWPP

SEQ ID NO: 20742 - protein, 5 aa, Homo sapiens
NSFPP

SEQ ID NO: 20743 - protein, 5 aa, Homo sapiens
NNWPP

SEQ ID NO: 20744 - protein, 5 aa, Homo sapiens
NSYPP

SEQ ID NO: 20745 - protein, 5 aa, Homo sapiens
NSYPP

SEQ ID NO: 20746 - protein, 5 aa, Homo sapiens
GSSPP

SEQ ID NO: 20747 - protein, 5 aa, Homo sapiens
SSSLP

SEQ ID NO: 20748 - protein, 5 aa, Homo sapiens
ATQFP

SEQ ID NO: 20749 - protein, 5 aa, Homo sapiens
NSAPP

SEQ ID NO: 20750 - protein, 5 aa, Homo sapiens
LQTPP

SEQ ID NO: 20751 - protein, 5 aa, Homo sapiens
THWPP

SEQ ID NO: 20752 - protein, 5 aa, Homo sapiens
DNLPP

SEQ ID NO: 20753 - protein, 5 aa, Homo sapiens
YNAPP

SEQ ID NO: 20754 - protein, 5 aa, Homo sapiens
YSTPP

SEQ ID NO: 20755 - protein, 5 aa, Homo sapiens
IEFPS

SEQ ID NO: 20756 - protein, 5 aa, Homo sapiens
DNLPP

SEQ ID NO: 20757 - protein, 5 aa, Homo sapiens
THWPP

SEQ ID NO: 20758 - protein, 5 aa, Homo sapiens
IQLPP

SEQ ID NO: 20759 - protein, 5 aa, Homo sapiens
AQDPP

SEQ ID NO: 20760 - protein, 5 aa, Homo sapiens
ATQFP

SEQ ID NO: 20761 - protein, 5 aa, Homo sapiens
GSSPP

SEQ ID NO: 20762 - protein, 5 aa, Homo sapiens
GNKHP

SEQ ID NO: 20763 - protein, 5 aa, Homo sapiens
NSYPP

SEQ ID NO: 20764 - protein, 5 aa, Homo sapiens
NSYPP

SEQ ID NO: 20765 - protein, 5 aa, Homo sapiens
NNWPP

SEQ ID NO: 20766 - protein, 5 aa, Homo sapiens
FNNYP

SEQ ID NO: 20767 - protein, 5 aa, Homo sapiens
NSFPP

SEQ ID NO: 20768 - protein, 5 aa, Homo sapiens
SNWHP

SEQ ID NO: 20769 - protein, 5 aa, Homo sapiens
FSYPP

SEQ ID NO: 20770 - protein, 5 aa, Homo sapiens
YSTPP

SEQ ID NO: 20771 - protein, 5 aa, Homo sapiens
YSFPP

SEQ ID NO: 20772 - protein, 5 aa, Homo sapiens
YNLPP

SEQ ID NO: 20773 - protein, 5 aa, Homo sapiens
WGTGI

SEQ ID NO: 20774 - protein, 5 aa, Homo sapiens
GSGIS

SEQ ID NO: 20775 - protein, 5 aa, Homo sapiens
WDSNT

SEQ ID NO: 20776 - protein, 5 aa, Homo sapiens
YDSSN

SEQ ID NO: 20777 - protein, 5 aa, Homo sapiens
ESSAN

SEQ ID NO: 20778 - protein, 5 aa, Homo sapiens
SSLSA

SEQ ID NO: 20779 - protein, 5 aa, Homo sapiens
HSNSK

SEQ ID NO: 20780 - protein, 5 aa, Homo sapiens
SLSAG

SEQ ID NO: 20781 - protein, 5 aa, Homo sapiens
NSLNA

SEQ ID NO: 20782 - protein, 5 aa, Homo sapiens
GSNFV

SEQ ID NO: 20783 - protein, 5 aa, Homo sapiens
HSSAS

SEQ ID NO: 20784 - protein, 5 aa, Homo sapiens
SLSGP

SEQ ID NO: 20785 - protein, 5 aa, Homo sapiens
YSGAR

SEQ ID NO: 20786 - protein, 5 aa, Homo sapiens
HSSAS

SEQ ID NO: 20787 - protein, 5 aa, Homo sapiens
SLNGP

SEQ ID NO: 20788 - protein, 5 aa, Homo sapiens
YGGAQ

SEQ ID NO: 20789 - protein, 5 aa, Homo sapiens
SLSGS

SEQ ID NO: 20790 - protein, 5 aa, Homo sapiens
PSNAS

SEQ ID NO: 20791 - protein, 5 aa, Homo sapiens
SLNGP

SEQ ID NO: 20792 - protein, 5 aa, Homo sapiens
SSYTF

SEQ ID NO: 20793 - protein, 5 aa, Homo sapiens
HATQL

SEQ ID NO: 20794 - protein, 5 aa, Homo sapiens
ADNNL

SEQ ID NO: 20795 - protein, 5 aa, Homo sapiens
SGTYP

SEQ ID NO: 20796 - protein, 5 aa, Homo sapiens
GSSTF

SEQ ID NO: 20797 - protein, 5 aa, Homo sapiens
DEDNP

SEQ ID NO: 20798 - protein, 5 aa, Homo sapiens
DHPTV

SEQ ID NO: 20799 - protein, 5 aa, Homo sapiens
SGNHL

SEQ ID NO: 20800 - protein, 5 aa, Homo sapiens
SSSTF

SEQ ID NO: 20801 - protein, 5 aa, Homo sapiens
SGTYP

SEQ ID NO: 20802 - protein, 5 aa, Homo sapiens
SSSTL

SEQ ID NO: 20803 - protein, 5 aa, Homo sapiens
SSDHP

SEQ ID NO: 20804 - protein, 5 aa, Homo sapiens
GSYTF

SEQ ID NO: 20805 - protein, 5 aa, Homo sapiens
SSGNH

SEQ ID NO: 20806 - protein, 5 aa, Homo sapiens
SSTAH

SEQ ID NO: 20807 - protein, 5 aa, Homo sapiens
GSNNF

SEQ ID NO: 20808 - protein, 5 aa, Homo sapiens
DGQVG

SEQ ID NO: 20809 - protein, 5 aa, Homo sapiens
DSSTA

SEQ ID NO: 20810 - protein, 5 aa, Homo sapiens
PTECS

SEQ ID NO: 20811 - protein, 5 aa, Homo sapiens
PTECS

SEQ ID NO: 20812 - protein, 5 aa, Homo sapiens
PTECS

SEQ ID NO: 20813 - protein, 5 aa, Homo sapiens
PAECS

SEQ ID NO: 20814 - protein, 5 aa, Homo sapiens
PAECS

SEQ ID NO: 20815 - protein, 5 aa, Homo sapiens
NGEKS

SEQ ID NO: 20816 - protein, 5 aa, Homo sapiens
NGEKS

SEQ ID NO: 20817 - protein, 5 aa, Homo sapiens
CWIRH

SEQ ID NO: 20818 - protein, 5 aa, Homo sapiens
CAAWD

SEQ ID NO: 20819 - protein, 5 aa, Homo sapiens
ALWEV

SEQ ID NO: 20820 - protein, 5 aa, Homo sapiens
ATWDR

SEQ ID NO: 20821 - protein, 5 aa, Homo sapiens
ATWDR

SEQ ID NO: 20822 - protein, 5 aa, Homo sapiens
ATWDG

SEQ ID NO: 20823 - protein, 5 aa, Homo sapiens
ATWDR

SEQ ID NO: 20824 - protein, 5 aa, Homo sapiens
ATWDG

SEQ ID NO: 20825 - protein, 5 aa, Homo sapiens
ATWDR

SEQ ID NO: 20826 - protein, 5 aa, Homo sapiens
ASSEA

SEQ ID NO: 20827 - protein, 5 aa, Homo sapiens
CASSQ

SEQ ID NO: 20828 - protein, 5 aa, Homo sapiens
CASSQ

SEQ ID NO: 20829 - protein, 5 aa, Homo sapiens
CASSL

SEQ ID NO: 20830 - protein, 5 aa, Homo sapiens
ASSEA

SEQ ID NO: 20831 - protein, 5 aa, Homo sapiens
ASSSA

SEQ ID NO: 20832 - protein, 5 aa, Homo sapiens
CASSQ

SEQ ID NO: 20833 - protein, 5 aa, Homo sapiens
ASSYS

SEQ ID NO: 20834 - protein, 5 aa, Homo sapiens
CASSQ

SEQ ID NO: 20835 - protein, 5 aa, Homo sapiens
ASSYS

SEQ ID NO: 20836 - protein, 5 aa, Homo sapiens
ASSLA

SEQ ID NO: 20837 - protein, 5 aa, Homo sapiens
ASSDS

SEQ ID NO: 20838 - protein, 5 aa, Homo sapiens
ASSLT

SEQ ID NO: 20839 - protein, 5 aa, Homo sapiens
CARSL

SEQ ID NO: 20840 - protein, 5 aa, Homo sapiens
CASSV

SEQ ID NO: 20841 - protein, 5 aa, Homo sapiens
ASSES

SEQ ID NO: 20842 - protein, 5 aa, Homo sapiens
ASSLA

SEQ ID NO: 20843 - protein, 5 aa, Homo sapiens
ASSES

SEQ ID NO: 20844 - protein, 5 aa, Homo sapiens
CASSL

SEQ ID NO: 20845 - protein, 5 aa, Homo sapiens
ASSYS

SEQ ID NO: 20846 - protein, 5 aa, Homo sapiens
ASSLA

SEQ ID NO: 20847 - protein, 5 aa, Homo sapiens
CASSL

SEQ ID NO: 20848 - protein, 5 aa, Homo sapiens
ASSYS

SEQ ID NO: 20849 - protein, 5 aa, Homo sapiens
CASSL

SEQ ID NO: 20850 - protein, 5 aa, Homo sapiens
ASSYS

SEQ ID NO: 20851 - protein, 5 aa, Homo sapiens
ASSLA

SEQ ID NO: 20852 - protein, 5 aa, Homo sapiens
CASSL

SEQ ID NO: 20853 - protein, 5 aa, Homo sapiens
ASSYS

SEQ ID NO: 20854 - protein, 5 aa, Homo sapiens
ASSLA

SEQ ID NO: 20855 - protein, 5 aa, Homo sapiens
CASSL

SEQ ID NO: 20856 - protein, 5 aa, Homo sapiens
ASSYS

SEQ ID NO: 20857 - protein, 5 aa, Homo sapiens
ASSLA

SEQ ID NO: 20858 - protein, 5 aa, Homo sapiens
CASSL

SEQ ID NO: 20859 - protein, 5 aa, Homo sapiens
ASSLA

SEQ ID NO: 20860 - protein, 5 aa, Homo sapiens
ASSLG

SEQ ID NO: 20861 - protein, 5 aa, Homo sapiens
AISES

SEQ ID NO: 20862 - protein, 5 aa, Homo sapiens
CASSL

SEQ ID NO: 20863 - protein, 5 aa, Homo sapiens
ASSLA

SEQ ID NO: 20864 - protein, 5 aa, Homo sapiens
ASSLA

SEQ ID NO: 20865 - protein, 5 aa, Homo sapiens
ASGLV

SEQ ID NO: 20866 - protein, 5 aa, Homo sapiens
CASSQ

SEQ ID NO: 20867 - protein, 5 aa, Homo sapiens
CATSR

SEQ ID NO: 20868 - protein, 5 aa, Homo sapiens
YSSGG

SEQ ID NO: 20869 - protein, 5 aa, Homo sapiens
ASSPP

SEQ ID NO: 20870 - protein, 5 aa, Homo sapiens
CASSI

SEQ ID NO: 20871 - protein, 5 aa, Homo sapiens
ICSAR

SEQ ID NO: 20872 - protein, 5 aa, Homo sapiens
ASSKA

SEQ ID NO: 20873 - protein, 5 aa, Homo sapiens
ASSQS

SEQ ID NO: 20874 - protein, 5 aa, Homo sapiens
ATSDL

SEQ ID NO: 20875 - protein, 5 aa, Homo sapiens
CASSE

SEQ ID NO: 20876 - protein, 5 aa, Homo sapiens
ASSLS

SEQ ID NO: 20877 - protein, 5 aa, Homo sapiens
CASSL

SEQ ID NO: 20878 - protein, 5 aa, Homo sapiens
LCSVE

SEQ ID NO: 20879 - protein, 5 aa, Homo sapiens
KRKDF

SEQ ID NO: 20880 - protein, 5 aa, Homo sapiens
KDSRG

SEQ ID NO: 20881 - protein, 5 aa, Homo sapiens
CAWSV

SEQ ID NO: 20882 - protein, 5 aa, Homo sapiens
FCAVR

SEQ ID NO: 20883 - protein, 5 aa, Homo sapiens
LCAVR

SEQ ID NO: 20884 - protein, 5 aa, Homo sapiens
YCAVE

SEQ ID NO: 20885 - protein, 5 aa, Homo sapiens
CAVRD

SEQ ID NO: 20886 - protein, 5 aa, Homo sapiens
CLVGD

SEQ ID NO: 20887 - protein, 5 aa, Homo sapiens
FCAES

SEQ ID NO: 20888 - protein, 5 aa, Homo sapiens
LCALD

SEQ ID NO: 20889 - protein, 5 aa, Homo sapiens
FCAVD

SEQ ID NO: 20890 - protein, 5 aa, Homo sapiens
CAVNA

SEQ ID NO: 20891 - protein, 5 aa, Homo sapiens
FCALS

SEQ ID NO: 20892 - protein, 5 aa, Homo sapiens
ICVVS

SEQ ID NO: 20893 - protein, 5 aa, Homo sapiens
LCVVN

SEQ ID NO: 20894 - protein, 5 aa, Homo sapiens
FCVVS

SEQ ID NO: 20895 - protein, 5 aa, Homo sapiens
CAVGA

SEQ ID NO: 20896 - protein, 5 aa, Homo sapiens
FCAAS

SEQ ID NO: 20897 - protein, 5 aa, Homo sapiens
YLCAV

SEQ ID NO: 20898 - protein, 5 aa, Homo sapiens
AVSDT

SEQ ID NO: 20899 - protein, 5 aa, Homo sapiens
FCAEN

SEQ ID NO: 20900 - protein, 5 aa, Homo sapiens
AMREG

SEQ ID NO: 20901 - protein, 5 aa, Homo sapiens
FCALS

SEQ ID NO: 20902 - protein, 5 aa, Homo sapiens
AMSAQ

SEQ ID NO: 20903 - protein, 5 aa, Homo sapiens
FCAVS

SEQ ID NO: 20904 - protein, 5 aa, Homo sapiens
CALSG

SEQ ID NO: 20905 - protein, 5 aa, Homo sapiens
FCATD

SEQ ID NO: 20906 - protein, 5 aa, Homo sapiens
YCALR

SEQ ID NO: 20907 - protein, 5 aa, Homo sapiens
ALSEA

SEQ ID NO: 20908 - protein, 5 aa, Homo sapiens
LCAVQ

SEQ ID NO: 20909 - protein, 5 aa, Homo sapiens
LCAVR

SEQ ID NO: 20910 - protein, 5 aa, Homo sapiens
FCAVE

SEQ ID NO: 20911 - protein, 5 aa, Homo sapiens
FCAAS

SEQ ID NO: 20912 - protein, 5 aa, Homo sapiens
ALGEL

SEQ ID NO: 20913 - protein, 5 aa, Homo sapiens
YLCAF

SEQ ID NO: 20914 - protein, 5 aa, Homo sapiens
YFCAG

SEQ ID NO: 20915 - protein, 5 aa, Homo sapiens
CIVRV

SEQ ID NO: 20916 - protein, 5 aa, Homo sapiens
AVGDR

SEQ ID NO: 20917 - protein, 5 aa, Homo sapiens
YLCAG

SEQ ID NO: 20918 - protein, 5 aa, Homo sapiens
FCAAS

SEQ ID NO: 20919 - protein, 5 aa, Homo sapiens
FCGTE

SEQ ID NO: 20920 - protein, 5 aa, Homo sapiens
CILRD

SEQ ID NO: 20921 - protein, 5 aa, Homo sapiens
LCGAD

SEQ ID NO: 20922 - protein, 5 aa, Homo sapiens
FCAGQ

SEQ ID NO: 20923 - protein, 5 aa, Homo sapiens
LCAVE

SEQ ID NO: 20924 - protein, 5 aa, Homo sapiens
CAFMK

SEQ ID NO: 20925 - protein, 5 aa, Homo sapiens
CAYRS

SEQ ID NO: 20926 - protein, 5 aa, Homo sapiens
FCAVD

SEQ ID NO: 20927 - protein, 5 aa, Homo sapiens
YCLLG

SEQ ID NO: 20928 - protein, 5 aa, Homo sapiens
ICAVR

SEQ ID NO: 20929 - protein, 5 aa, Homo sapiens
CACDT

SEQ ID NO: 20930 - protein, 5 aa, Homo sapiens
KLFFL

SEQ ID NO: 20931 - protein, 5 aa, Homo sapiens
YYCAF

SEQ ID NO: 20932 - protein, 5 aa, Homo sapiens
RLWSS

SEQ ID NO: 20933 - protein, 5 aa, Homo sapiens
EGPQY

SEQ ID NO: 20934 - protein, 5 aa, Homo sapiens
LQPHA

SEQ ID NO: 20935 - protein, 5 aa, Homo sapiens
IRQGA

SEQ ID NO: 20936 - protein, 5 aa, Homo sapiens
IRQGA

SEQ ID NO: 20937 - protein, 5 aa, Homo sapiens
SLSPG

SEQ ID NO: 20938 - protein, 5 aa, Homo sapiens
DGTCY

SEQ ID NO: 20939 - protein, 5 aa, Homo sapiens
IGQGA

SEQ ID NO: 20940 - protein, 5 aa, Homo sapiens
IGQGA

SEQ ID NO: 20941 - protein, 5 aa, Homo sapiens
FIKVR

SEQ ID NO: 20942 - protein, 5 aa, Homo sapiens
TLFKV

SEQ ID NO: 20943 - protein, 5 aa, Homo sapiens
YYCAR

SEQ ID NO: 20944 - protein, 5 aa, Homo sapiens
YYCAR

SEQ ID NO: 20945 - protein, 5 aa, Homo sapiens
YYCAR

SEQ ID NO: 20946 - protein, 5 aa, Homo sapiens
YYCAR

SEQ ID NO: 20947 - protein, 5 aa, Homo sapiens
YCAHR

SEQ ID NO: 20948 - protein, 5 aa, Homo sapiens
YYCAR

SEQ ID NO: 20949 - protein, 5 aa, Homo sapiens
YCARG

SEQ ID NO: 20950 - protein, 5 aa, Homo sapiens
YCAKD

SEQ ID NO: 20951 - protein, 5 aa, Homo sapiens
YYCAR

SEQ ID NO: 20952 - protein, 5 aa, Homo sapiens
YYCAR

SEQ ID NO: 20953 - protein, 5 aa, Homo sapiens
YYCTT

SEQ ID NO: 20954 - protein, 5 aa, Homo sapiens
YYCVR

SEQ ID NO: 20955 - protein, 5 aa, Homo sapiens
YYCAR

SEQ ID NO: 20956 - protein, 5 aa, Homo sapiens
YHCAR

SEQ ID NO: 20957 - protein, 5 aa, Homo sapiens
YYCAR

SEQ ID NO: 20958 - protein, 5 aa, Homo sapiens
ECRGE

SEQ ID NO: 20959 - protein, 5 aa, Homo sapiens
YYCAK

SEQ ID NO: 20960 - protein, 5 aa, Homo sapiens
YYCAT

SEQ ID NO: 20961 - protein, 5 aa, Homo sapiens
YCARI

SEQ ID NO: 20962 - protein, 5 aa, Homo sapiens
YYCAR

SEQ ID NO: 20963 - protein, 5 aa, Homo sapiens
YYCAR

SEQ ID NO: 20964 - protein, 5 aa, Homo sapiens
YYCAR

SEQ ID NO: 20965 - protein, 5 aa, Homo sapiens
YYCAR

SEQ ID NO: 20966 - protein, 5 aa, Homo sapiens
YCARG

SEQ ID NO: 20967 - protein, 5 aa, Homo sapiens
YYCVR

SEQ ID NO: 20968 - protein, 5 aa, Homo sapiens
YCARY

SEQ ID NO: 20969 - protein, 5 aa, Homo sapiens
YYCAR

SEQ ID NO: 20970 - protein, 5 aa, Homo sapiens
YCAKD

SEQ ID NO: 20971 - protein, 5 aa, Homo sapiens
YYCAR

SEQ ID NO: 20972 - protein, 5 aa, Homo sapiens
YYCAR

SEQ ID NO: 20973 - protein, 5 aa, Homo sapiens
YYCAR

SEQ ID NO: 20974 - protein, 5 aa, Homo sapiens
YYCAR

SEQ ID NO: 20975 - protein, 5 aa, Homo sapiens
YYCTR

SEQ ID NO: 20976 - protein, 5 aa, Homo sapiens
YYCAR

SEQ ID NO: 20977 - protein, 5 aa, Homo sapiens
YYCAR

SEQ ID NO: 20978 - protein, 5 aa, Homo sapiens
YYCAA

SEQ ID NO: 20979 - protein, 5 aa, Homo sapiens
YYCAR

SEQ ID NO: 20980 - protein, 5 aa, Homo sapiens
YYCAR

SEQ ID NO: 20981 - protein, 5 aa, Homo sapiens
YYCAR

SEQ ID NO: 20982 - protein, 5 aa, Homo sapiens
YYCAR

SEQ ID NO: 20983 - protein, 5 aa, Homo sapiens
ARDTV

SEQ ID NO: 20984 - protein, 5 aa, Homo sapiens
YCARI

SEQ ID NO: 20985 - protein, 5 aa, Homo sapiens
YYCAR

SEQ ID NO: 20986 - protein, 5 aa, Homo sapiens
YYCTR

SEQ ID NO: 20987 - protein, 5 aa, Homo sapiens
YYCAR

SEQ ID NO: 20988 - protein, 5 aa, Homo sapiens
YYCVR

SEQ ID NO: 20989 - protein, 5 aa, Homo sapiens
YYCAR

SEQ ID NO: 20990 - protein, 5 aa, Homo sapiens
CSCCA

SEQ ID NO: 20991 - protein, 5 aa, Homo sapiens
ACRVN

SEQ ID NO: 20992 - protein, 5 aa, Homo sapiens
ECPAS

SEQ ID NO: 20993 - protein, 5 aa, Homo sapiens
YWWKN

SEQ ID NO: 20994 - protein, 5 aa, Homo sapiens
GPTSP

SEQ ID NO: 20995 - protein, 5 aa, Homo sapiens
PTGFP

SEQ ID NO: 20996 - protein, 5 aa, Homo sapiens
QESPF

SEQ ID NO: 20997 - protein, 5 aa, Homo sapiens
GCWHK

SEQ ID NO: 20998 - protein, 5 aa, Homo sapiens
EAKAI

SEQ ID NO: 20999 - protein, 5 aa, Homo sapiens
FINRE

SEQ ID NO: 21000 - protein, 5 aa, Homo sapiens
QSLCC

SEQ ID NO: 21001 - protein, 5 aa, Homo sapiens
DLEPL

SEQ ID NO: 21002 - protein, 5 aa, Homo sapiens
ETRAQ

SEQ ID NO: 21003 - protein, 5 aa, Homo sapiens
AWTTW

SEQ ID NO: 21004 - protein, 5 aa, Homo sapiens
QEVKV

SEQ ID NO: 21005 - protein, 5 aa, Homo sapiens
ANSGL

SEQ ID NO: 21006 - protein, 5 aa, Homo sapiens
NLGRF

SEQ ID NO: 21007 - protein, 5 aa, Homo sapiens
TADCR

SEQ ID NO: 21008 - protein, 5 aa, Homo sapiens
GATPH

SEQ ID NO: 21009 - protein, 5 aa, Homo sapiens
WQMTR

SEQ ID NO: 21010 - protein, 5 aa, Homo sapiens
NQSTP

SEQ ID NO: 21011 - protein, 5 aa, Homo sapiens
CQIRC

SEQ ID NO: 21012 - protein, 5 aa, Homo sapiens
FRESS

SEQ ID NO: 21013 - protein, 5 aa, Homo sapiens
VWAKR

SEQ ID NO: 21014 - protein, 5 aa, Homo sapiens
LLGSL

SEQ ID NO: 21015 - protein, 5 aa, Homo sapiens
RPPRP

SEQ ID NO: 21016 - protein, 5 aa, Homo sapiens
FSGFY

SEQ ID NO: 21017 - protein, 5 aa, Homo sapiens
FSGFY

SEQ ID NO: 21018 - protein, 5 aa, Homo sapiens
RSGFY

SEQ ID NO: 21019 - protein, 5 aa, Homo sapiens
KSRLQ

SEQ ID NO: 21020 - protein, 5 aa, Homo sapiens
DGQSP

SEQ ID NO: 21021 - protein, 5 aa, Homo sapiens
LLTSQ

SEQ ID NO: 21022 - protein, 5 aa, Homo sapiens
GVGRG

SEQ ID NO: 21023 - protein, 5 aa, Homo sapiens
PLIPM

SEQ ID NO: 21024 - protein, 5 aa, Homo sapiens
LLEEL

SEQ ID NO: 21025 - protein, 5 aa, Homo sapiens
LLEEL

SEQ ID NO: 21026 - protein, 5 aa, Homo sapiens
CCPGL

SEQ ID NO: 21027 - protein, 5 aa, Homo sapiens
RRPCG

SEQ ID NO: 21028 - protein, 5 aa, Homo sapiens
SPQSK

SEQ ID NO: 21029 - protein, 5 aa, Homo sapiens
AVMQS

SEQ ID NO: 21030 - protein, 5 aa, Homo sapiens
GSGRA

SEQ ID NO: 21031 - protein, 5 aa, Homo sapiens
AKPKP

SEQ ID NO: 21032 - protein, 5 aa, Homo sapiens
TLRTK

SEQ ID NO: 21033 - protein, 5 aa, Homo sapiens
FRDEK

SEQ ID NO: 21034 - protein, 5 aa, Homo sapiens
SYSVE

SEQ ID NO: 21035 - protein, 5 aa, Homo sapiens
FLPQC

SEQ ID NO: 21036 - protein, 5 aa, Homo sapiens
AHEQG

SEQ ID NO: 21037 - protein, 5 aa, Homo sapiens
YFLNS

SEQ ID NO: 21038 - protein, 5 aa, Homo sapiens
FMTNQ

SEQ ID NO: 21039 - protein, 5 aa, Homo sapiens
LCVLS

SEQ ID NO: 21040 - protein, 5 aa, Homo sapiens
NPNIL

SEQ ID NO: 21041 - protein, 5 aa, Homo sapiens
LPIRN

SEQ ID NO: 21042 - protein, 5 aa, Homo sapiens
KPANC

SEQ ID NO: 21043 - protein, 5 aa, Homo sapiens
KATLC

SEQ ID NO: 21044 - protein, 5 aa, Homo sapiens
QPACC

SEQ ID NO: 21045 - protein, 5 aa, Homo sapiens
QHSCC

SEQ ID NO: 21046 - protein, 5 aa, Homo sapiens
GSSCC

SEQ ID NO: 21047 - protein, 5 aa, Homo sapiens
RHCGI

SEQ ID NO: 21048 - protein, 5 aa, Homo sapiens
RQRVQ

SEQ ID NO: 21049 - protein, 5 aa, Homo sapiens
PQSSS

SEQ ID NO: 21050 - protein, 5 aa, Homo sapiens
LMARE

SEQ ID NO: 21051 - protein, 5 aa, Homo sapiens
SVLRK

SEQ ID NO: 21052 - protein, 5 aa, Homo sapiens
RSEGS

SEQ ID NO: 21053 - protein, 5 aa, Homo sapiens
QVFKK

SEQ ID NO: 21054 - protein, 5 aa, Homo sapiens
DSPGG

SEQ ID NO: 21055 - protein, 5 aa, Homo sapiens
LAQYL

SEQ ID NO: 21056 - protein, 5 aa, Homo sapiens
IWERT

SEQ ID NO: 21057 - protein, 5 aa, Homo sapiens
WPGWS

SEQ ID NO: 21058 - protein, 5 aa, Homo sapiens
TMDQI

SEQ ID NO: 21059 - protein, 5 aa, Homo sapiens
AWPTW

SEQ ID NO: 21060 - protein, 5 aa, Homo sapiens
HLSSP

SEQ ID NO: 21061 - protein, 5 aa, Homo sapiens
IFLVG

SEQ ID NO: 21062 - protein, 5 aa, Homo sapiens
QGRFQ

SEQ ID NO: 21063 - protein, 5 aa, Homo sapiens
VYICK

SEQ ID NO: 21064 - protein, 5 aa, Homo sapiens
SVKKP

SEQ ID NO: 21065 - protein, 5 aa, Homo sapiens
LEALE

SEQ ID NO: 21066 - protein, 5 aa, Homo sapiens
LPKLV

SEQ ID NO: 21067 - protein, 5 aa, Homo sapiens
YRGGP

SEQ ID NO: 21068 - protein, 5 aa, Homo sapiens
QRTRG

SEQ ID NO: 21069 - protein, 5 aa, Homo sapiens
DGGDI

SEQ ID NO: 21070 - protein, 5 aa, Homo sapiens
LLTSQ

SEQ ID NO: 21071 - protein, 5 aa, Homo sapiens
TEKRR

SEQ ID NO: 21072 - protein, 5 aa, Homo sapiens
LLTSQ

SEQ ID NO: 21073 - protein, 5 aa, Homo sapiens
AGLSR

SEQ ID NO: 21074 - protein, 5 aa, Homo sapiens
RKHPS

SEQ ID NO: 21075 - protein, 5 aa, Homo sapiens
GESGH

SEQ ID NO: 21076 - protein, 5 aa, Homo sapiens
PNTFF

SEQ ID NO: 21077 - protein, 5 aa, Homo sapiens
NCCIK

SEQ ID NO: 21078 - protein, 5 aa, Homo sapiens
GVQWH

SEQ ID NO: 21079 - protein, 5 aa, Homo sapiens
GLGNL

SEQ ID NO: 21080 - protein, 5 aa, Homo sapiens
ESKQK

SEQ ID NO: 21081 - protein, 5 aa, Homo sapiens
SCGLV

SEQ ID NO: 21082 - protein, 5 aa, Homo sapiens
NKLKK

SEQ ID NO: 21083 - protein, 5 aa, Homo sapiens
RGHQL

SEQ ID NO: 21084 - protein, 5 aa, Homo sapiens
PARKP

SEQ ID NO: 21085 - protein, 5 aa, Homo sapiens
DKIKA

SEQ ID NO: 21086 - protein, 5 aa, Homo sapiens
LLESP

SEQ ID NO: 21087 - protein, 5 aa, Homo sapiens
GNFNR

SEQ ID NO: 21088 - protein, 5 aa, Homo sapiens
QEPFC

SEQ ID NO: 21089 - protein, 5 aa, Homo sapiens
MLLEK

SEQ ID NO: 21090 - protein, 5 aa, Homo sapiens
GVNLR

SEQ ID NO: 21091 - protein, 5 aa, Homo sapiens
TAKAL

SEQ ID NO: 21092 - protein, 5 aa, Homo sapiens
APPEG

SEQ ID NO: 21093 - protein, 5 aa, Homo sapiens
VCVYI

SEQ ID NO: 21094 - protein, 5 aa, Homo sapiens
SQAVC

SEQ ID NO: 21095 - protein, 5 aa, Homo sapiens
SNTDS

SEQ ID NO: 21096 - protein, 5 aa, Homo sapiens
GLWLS

SEQ ID NO: 21097 - protein, 5 aa, Homo sapiens
ASSCC

SEQ ID NO: 21098 - protein, 5 aa, Homo sapiens
ASSCC

SEQ ID NO: 21099 - protein, 5 aa, Homo sapiens
KSMLQ

SEQ ID NO: 21100 - protein, 5 aa, Homo sapiens
ASSCC

SEQ ID NO: 21101 - protein, 5 aa, Homo sapiens
RTSSC

SEQ ID NO: 21102 - protein, 5 aa, Homo sapiens
RTSSC

SEQ ID NO: 21103 - protein, 5 aa, Homo sapiens
CEPTC

SEQ ID NO: 21104 - protein, 5 aa, Homo sapiens
HPEQV

SEQ ID NO: 21105 - protein, 5 aa, Homo sapiens
LAEFY

SEQ ID NO: 21106 - protein, 5 aa, Homo sapiens
HGIHV

SEQ ID NO: 21107 - protein, 5 aa, Homo sapiens
CSDNV

SEQ ID NO: 21108 - protein, 5 aa, Homo sapiens
YISPG

SEQ ID NO: 21109 - protein, 5 aa, Homo sapiens
TMGQA

SEQ ID NO: 21110 - protein, 5 aa, Homo sapiens
AAFGL

SEQ ID NO: 21111 - protein, 5 aa, Homo sapiens
NHKSM

SEQ ID NO: 21112 - protein, 5 aa, Homo sapiens
GHPRS

SEQ ID NO: 21113 - protein, 5 aa, Homo sapiens
SQPRK

SEQ ID NO: 21114 - protein, 5 aa, Homo sapiens
AYLKH

SEQ ID NO: 21115 - protein, 5 aa, Homo sapiens
KQTFI

SEQ ID NO: 21116 - protein, 5 aa, Homo sapiens
WSRSR

SEQ ID NO: 21117 - protein, 5 aa, Homo sapiens
NVPNS

SEQ ID NO: 21118 - protein, 5 aa, Homo sapiens
GGVHL

SEQ ID NO: 21119 - protein, 5 aa, Homo sapiens
GTRPS

SEQ ID NO: 21120 - protein, 5 aa, Homo sapiens
EAKSD

SEQ ID NO: 21121 - protein, 5 aa, Homo sapiens
TAPTS

SEQ ID NO: 21122 - protein, 5 aa, Homo sapiens
QALLG

SEQ ID NO: 21123 - protein, 5 aa, Homo sapiens
EDEDF

SEQ ID NO: 21124 - protein, 5 aa, Homo sapiens
EDEDF

SEQ ID NO: 21125 - protein, 5 aa, Homo sapiens
FVLVI

SEQ ID NO: 21126 - protein, 5 aa, Homo sapiens
KRDHP

SEQ ID NO: 21127 - protein, 5 aa, Homo sapiens
KRDHP

SEQ ID NO: 21128 - protein, 5 aa, Homo sapiens
KRDHP

SEQ ID NO: 21129 - protein, 5 aa, Homo sapiens
KRDHP

SEQ ID NO: 21130 - protein, 5 aa, Homo sapiens
KRDHP

SEQ ID NO: 21131 - protein, 5 aa, Homo sapiens
KRDHP

SEQ ID NO: 21132 - protein, 5 aa, Homo sapiens
LLVFY

SEQ ID NO: 21133 - protein, 5 aa, Homo sapiens
SPRGM

SEQ ID NO: 21134 - protein, 5 aa, Homo sapiens
CPHEE

SEQ ID NO: 21135 - protein, 5 aa, Homo sapiens
YCNPK

SEQ ID NO: 21136 - protein, 5 aa, Homo sapiens
QTRRS

SEQ ID NO: 21137 - protein, 5 aa, Homo sapiens
LSMAG

SEQ ID NO: 21138 - protein, 5 aa, Homo sapiens
AGDAK

SEQ ID NO: 21139 - protein, 5 aa, Homo sapiens
IPDVR

SEQ ID NO: 21140 - protein, 5 aa, Homo sapiens
RRHPL

SEQ ID NO: 21141 - protein, 5 aa, Homo sapiens
QHKDE

SEQ ID NO: 21142 - protein, 5 aa, Homo sapiens
LLTSQ

SEQ ID NO: 21143 - protein, 5 aa, Homo sapiens
LLTSQ

SEQ ID NO: 21144 - protein, 5 aa, Homo sapiens
APCGQ

SEQ ID NO: 21145 - protein, 5 aa, Homo sapiens
APLSN

SEQ ID NO: 21146 - protein, 5 aa, Homo sapiens
FFLFY

SEQ ID NO: 21147 - protein, 5 aa, Homo sapiens
LQEQV

SEQ ID NO: 21148 - protein, 5 aa, Homo sapiens
IFIKL

SEQ ID NO: 21149 - protein, 5 aa, Homo sapiens
DRRAP

SEQ ID NO: 21150 - protein, 5 aa, Homo sapiens
LLTSQ

SEQ ID NO: 21151 - protein, 5 aa, Homo sapiens
AVPPL

SEQ ID NO: 21152 - protein, 5 aa, Homo sapiens
PPTEP

SEQ ID NO: 21153 - protein, 5 aa, Homo sapiens
SNQRM

SEQ ID NO: 21154 - protein, 5 aa, Homo sapiens
HTTKK

SEQ ID NO: 21155 - protein, 5 aa, Homo sapiens
VAELI

SEQ ID NO: 21156 - protein, 5 aa, Homo sapiens
HCLPS

SEQ ID NO: 21157 - protein, 5 aa, Homo sapiens
FGGQA

SEQ ID NO: 21158 - protein, 5 aa, Homo sapiens
HVIWI

SEQ ID NO: 21159 - protein, 5 aa, Homo sapiens
GWRLQ

SEQ ID NO: 21160 - protein, 5 aa, Homo sapiens
CSLPL

SEQ ID NO: 21161 - protein, 5 aa, Homo sapiens
CHHTS

SEQ ID NO: 21162 - protein, 5 aa, Homo sapiens
CSPPG

SEQ ID NO: 21163 - protein, 5 aa, Homo sapiens
IIEVM

SEQ ID NO: 21164 - protein, 5 aa, Homo sapiens
AEEDV

SEQ ID NO: 21165 - protein, 5 aa, Homo sapiens
AKFLA

SEQ ID NO: 21166 - protein, 5 aa, Homo sapiens
PTPFR

SEQ ID NO: 21167 - protein, 5 aa, Homo sapiens
LHRYR

SEQ ID NO: 21168 - protein, 5 aa, Homo sapiens
STMYI

SEQ ID NO: 21169 - protein, 5 aa, Homo sapiens
RFSEC

SEQ ID NO: 21170 - protein, 5 aa, Homo sapiens
KESHS

SEQ ID NO: 21171 - protein, 5 aa, Homo sapiens
KESHS

SEQ ID NO: 21172 - protein, 5 aa, Homo sapiens
RTLSM

SEQ ID NO: 21173 - protein, 5 aa, Homo sapiens
KERLT

SEQ ID NO: 21174 - protein, 5 aa, Homo sapiens
YGLCL

SEQ ID NO: 21175 - protein, 5 aa, Homo sapiens
KQRSM

SEQ ID NO: 21176 - protein, 5 aa, Homo sapiens
KKRTS

SEQ ID NO: 21177 - protein, 5 aa, Homo sapiens
KQRSK

SEQ ID NO: 21178 - protein, 5 aa, Homo sapiens
ASRSD

SEQ ID NO: 21179 - protein, 5 aa, Homo sapiens
MRHPK

SEQ ID NO: 21180 - protein, 5 aa, Homo sapiens
GFWVA

SEQ ID NO: 21181 - protein, 5 aa, Homo sapiens
KGQTL

SEQ ID NO: 21182 - protein, 5 aa, Homo sapiens
LCKAQ

SEQ ID NO: 21183 - protein, 5 aa, Homo sapiens
QLFRN

SEQ ID NO: 21184 - protein, 5 aa, Homo sapiens
YVKPK

SEQ ID NO: 21185 - protein, 5 aa, Homo sapiens
QATSG

SEQ ID NO: 21186 - protein, 5 aa, Homo sapiens
KQSDQ

SEQ ID NO: 21187 - protein, 5 aa, Homo sapiens
HSPVK

SEQ ID NO: 21188 - protein, 5 aa, Homo sapiens
ADFAC

SEQ ID NO: 21189 - protein, 5 aa, Homo sapiens
LWGVR

SEQ ID NO: 21190 - protein, 5 aa, Homo sapiens
DGRGA

SEQ ID NO: 21191 - protein, 5 aa, Homo sapiens
LSTFE

SEQ ID NO: 21192 - protein, 5 aa, Homo sapiens
PPKPM

SEQ ID NO: 21193 - protein, 5 aa, Homo sapiens
LEMRL

SEQ ID NO: 21194 - protein, 5 aa, Homo sapiens
KVTVK

SEQ ID NO: 21195 - protein, 5 aa, Homo sapiens
WNAVA

SEQ ID NO: 21196 - protein, 5 aa, Homo sapiens
SPPST

SEQ ID NO: 21197 - protein, 5 aa, Homo sapiens
KFLLY

SEQ ID NO: 21198 - protein, 5 aa, Homo sapiens
GGTEQ

SEQ ID NO: 21199 - protein, 5 aa, Homo sapiens
GGTEQ

SEQ ID NO: 21200 - protein, 5 aa, Homo sapiens
GWDEP

SEQ ID NO: 21201 - protein, 5 aa, Homo sapiens
QCMKI

SEQ ID NO: 21202 - protein, 5 aa, Homo sapiens
RTGRA

SEQ ID NO: 21203 - protein, 5 aa, Homo sapiens
LPGLR

SEQ ID NO: 21204 - protein, 5 aa, Homo sapiens
SALPF

SEQ ID NO: 21205 - protein, 5 aa, Homo sapiens
SLPKC

SEQ ID NO: 21206 - protein, 5 aa, Homo sapiens
GLNRG

SEQ ID NO: 21207 - protein, 5 aa, Homo sapiens
SLAVK

SEQ ID NO: 21208 - protein, 5 aa, Homo sapiens
FLCHG

SEQ ID NO: 21209 - protein, 5 aa, Homo sapiens
LLKMI

SEQ ID NO: 21210 - protein, 5 aa, Homo sapiens
CERPV

SEQ ID NO: 21211 - protein, 5 aa, Homo sapiens
CERPV

SEQ ID NO: 21212 - protein, 5 aa, Homo sapiens
SEVIS

SEQ ID NO: 21213 - protein, 5 aa, Homo sapiens
DNPPA

SEQ ID NO: 21214 - protein, 5 aa, Homo sapiens
ASTWV

SEQ ID NO: 21215 - protein, 5 aa, Homo sapiens
AWLQS

SEQ ID NO: 21216 - protein, 5 aa, Homo sapiens
IEEVD

SEQ ID NO: 21217 - protein, 5 aa, Homo sapiens
PGKGL

SEQ ID NO: 21218 - protein, 5 aa, Homo sapiens
VPMEI

SEQ ID NO: 21219 - protein, 5 aa, Homo sapiens
DNPPA

SEQ ID NO: 21220 - protein, 5 aa, Homo sapiens
ACRVN

SEQ ID NO: 21221 - protein, 5 aa, Homo sapiens
SFVDF

SEQ ID NO: 21222 - protein, 5 aa, Homo sapiens
ACSIM

SEQ ID NO: 21223 - protein, 5 aa, Homo sapiens
VCIRG

SEQ ID NO: 21224 - protein, 5 aa, Homo sapiens
IEEVD

SEQ ID NO: 21225 - protein, 5 aa, Homo sapiens
PGKGL

SEQ ID NO: 21226 - protein, 5 aa, Homo sapiens
AQIQP

SEQ ID NO: 21227 - protein, 5 aa, Homo sapiens
NKMLK

SEQ ID NO: 21228 - protein, 5 aa, Homo sapiens
IARGN

SEQ ID NO: 21229 - protein, 5 aa, Homo sapiens
LLLIT

SEQ ID NO: 21230 - protein, 5 aa, Homo sapiens
NLLQC

SEQ ID NO: 21231 - protein, 5 aa, Homo sapiens
LDWAE

SEQ ID NO: 21232 - protein, 5 aa, Homo sapiens
YVSIY

SEQ ID NO: 21233 - protein, 5 aa, Homo sapiens
PVFTL

SEQ ID NO: 21234 - protein, 5 aa, Homo sapiens
VYMKS

SEQ ID NO: 21235 - protein, 5 aa, Homo sapiens
MLMIL

SEQ ID NO: 21236 - protein, 5 aa, Homo sapiens
LYEVM

SEQ ID NO: 21237 - protein, 5 aa, Homo sapiens
GTHYR

SEQ ID NO: 21238 - protein, 5 aa, Homo sapiens
VPGCA

SEQ ID NO: 21239 - protein, 5 aa, Homo sapiens
RAPAS

SEQ ID NO: 21240 - protein, 5 aa, Homo sapiens
FLVVL

SEQ ID NO: 21241 - protein, 5 aa, Homo sapiens
VNFQC

SEQ ID NO: 21242 - protein, 5 aa, Homo sapiens
RQRSF

SEQ ID NO: 21243 - protein, 5 aa, Homo sapiens
LVTVG

SEQ ID NO: 21244 - protein, 5 aa, Homo sapiens
LVTVG

SEQ ID NO: 21245 - protein, 5 aa, Homo sapiens
SFCYR

SEQ ID NO: 21246 - protein, 5 aa, Homo sapiens
LYEVM

SEQ ID NO: 21247 - protein, 5 aa, Homo sapiens
LVTVG

SEQ ID NO: 21248 - protein, 5 aa, Homo sapiens
RQRSF

SEQ ID NO: 21249 - protein, 5 aa, Homo sapiens
PLIPM

SEQ ID NO: 21250 - protein, 5 aa, Homo sapiens
LVTVG

SEQ ID NO: 21251 - protein, 5 aa, Homo sapiens
RQRSF

SEQ ID NO: 21252 - protein, 5 aa, Homo sapiens
LPRGC

SEQ ID NO: 21253 - protein, 5 aa, Homo sapiens
LPRGC

SEQ ID NO: 21254 - protein, 5 aa, Homo sapiens
CEPRC

SEQ ID NO: 21255 - protein, 5 aa, Homo sapiens
RTSSC

SEQ ID NO: 21256 - protein, 5 aa, Homo sapiens
RTSSC

SEQ ID NO: 21257 - protein, 5 aa, Homo sapiens
RTSSC

SEQ ID NO: 21258 - protein, 5 aa, Homo sapiens
RTSSC

SEQ ID NO: 21259 - protein, 5 aa, Homo sapiens
ASSCC

SEQ ID NO: 21260 - protein, 5 aa, Homo sapiens
ASSCC

SEQ ID NO: 21261 - protein, 5 aa, Homo sapiens
ASSCC

SEQ ID NO: 21262 - protein, 5 aa, Homo sapiens
FSLWL

SEQ ID NO: 21263 - protein, 5 aa, Homo sapiens
RAPAS

SEQ ID NO: 21264 - protein, 5 aa, Homo sapiens
NLKEC

SEQ ID NO: 21265 - protein, 5 aa, Homo sapiens
TGGKV

SEQ ID NO: 21266 - protein, 5 aa, Homo sapiens
CPTRI

SEQ ID NO: 21267 - protein, 5 aa, Homo sapiens
GSGRR

SEQ ID NO: 21268 - protein, 5 aa, Homo sapiens
PGYTM

SEQ ID NO: 21269 - protein, 5 aa, Homo sapiens
PQSSS

SEQ ID NO: 21270 - protein, 5 aa, Homo sapiens
MTFSC

SEQ ID NO: 21271 - protein, 5 aa, Homo sapiens
NVTFL

SEQ ID NO: 21272 - protein, 5 aa, Homo sapiens
HASAS

SEQ ID NO: 21273 - protein, 5 aa, Homo sapiens
LILLG

SEQ ID NO: 21274 - protein, 5 aa, Homo sapiens
PTLGG

SEQ ID NO: 21275 - protein, 5 aa, Homo sapiens
NSSLA

SEQ ID NO: 21276 - protein, 5 aa, Homo sapiens
FMVIS

SEQ ID NO: 21277 - protein, 5 aa, Homo sapiens
DLAHR

SEQ ID NO: 21278 - protein, 5 aa, Homo sapiens
VGFLY

SEQ ID NO: 21279 - protein, 5 aa, Homo sapiens
QIGEG

SEQ ID NO: 21280 - protein, 5 aa, Homo sapiens
AWPTW

SEQ ID NO: 21281 - protein, 5 aa, Homo sapiens
TKSYT

SEQ ID NO: 21282 - protein, 5 aa, Homo sapiens
LSPAG

SEQ ID NO: 21283 - protein, 5 aa, Homo sapiens
TPSCC

SEQ ID NO: 21284 - protein, 5 aa, Homo sapiens
TPTGC

SEQ ID NO: 21285 - protein, 5 aa, Homo sapiens
QKSSC

SEQ ID NO: 21286 - protein, 5 aa, Homo sapiens
QKSSC

SEQ ID NO: 21287 - protein, 5 aa, Homo sapiens
QKSSC

SEQ ID NO: 21288 - protein, 5 aa, Homo sapiens
GRHVH

SEQ ID NO: 21289 - protein, 5 aa, Homo sapiens
IPKMS

SEQ ID NO: 21290 - protein, 5 aa, Homo sapiens
FGYYY

SEQ ID NO: 21291 - protein, 5 aa, Homo sapiens
AHYLL

SEQ ID NO: 21292 - protein, 5 aa, Homo sapiens
CGSHL

SEQ ID NO: 21293 - protein, 5 aa, Homo sapiens
MGVPM

SEQ ID NO: 21294 - protein, 5 aa, Homo sapiens
GGGQT

SEQ ID NO: 21295 - protein, 5 aa, Homo sapiens
ELACI

SEQ ID NO: 21296 - protein, 5 aa, Homo sapiens
PGRKH

SEQ ID NO: 21297 - protein, 5 aa, Homo sapiens
LVALE

SEQ ID NO: 21298 - protein, 5 aa, Homo sapiens
DFLYF

SEQ ID NO: 21299 - protein, 5 aa, Homo sapiens
GAELT

SEQ ID NO: 21300 - protein, 5 aa, Homo sapiens
EEDKK

SEQ ID NO: 21301 - protein, 5 aa, Homo sapiens
LVALE

SEQ ID NO: 21302 - protein, 5 aa, Homo sapiens
LVALE

SEQ ID NO: 21303 - protein, 5 aa, Homo sapiens
YRAGM

SEQ ID NO: 21304 - protein, 5 aa, Homo sapiens
LLTSQ

SEQ ID NO: 21305 - protein, 5 aa, Homo sapiens
LLTSQ

SEQ ID NO: 21306 - protein, 5 aa, Homo sapiens
ELSQA

SEQ ID NO: 21307 - protein, 5 aa, Homo sapiens
SGRRF

SEQ ID NO: 21308 - protein, 5 aa, Homo sapiens
MSYPK

SEQ ID NO: 21309 - protein, 5 aa, Homo sapiens
LTFSP

SEQ ID NO: 21310 - protein, 5 aa, Homo sapiens
LAWQT

SEQ ID NO: 21311 - protein, 5 aa, Homo sapiens
LVRPR

SEQ ID NO: 21312 - protein, 5 aa, Homo sapiens
RERPK

SEQ ID NO: 21313 - protein, 5 aa, Homo sapiens
ACWEM

SEQ ID NO: 21314 - protein, 5 aa, Homo sapiens
GLLTS

SEQ ID NO: 21315 - protein, 5 aa, Homo sapiens
RQRVQ

SEQ ID NO: 21316 - protein, 5 aa, Homo sapiens
VGVYY

SEQ ID NO: 21317 - protein, 5 aa, Homo sapiens
RAATE

SEQ ID NO: 21318 - protein, 5 aa, Homo sapiens
PARFA

SEQ ID NO: 21319 - protein, 5 aa, Homo sapiens
AVFSG

SEQ ID NO: 21320 - protein, 5 aa, Homo sapiens
NNGCQ

SEQ ID NO: 21321 - protein, 5 aa, Homo sapiens
FGLFD

SEQ ID NO: 21322 - protein, 5 aa, Homo sapiens
CQNRF

SEQ ID NO: 21323 - protein, 5 aa, Homo sapiens
VTLSI

SEQ ID NO: 21324 - protein, 5 aa, Homo sapiens
QWIPL

SEQ ID NO: 21325 - protein, 5 aa, Homo sapiens
FFFSF

SEQ ID NO: 21326 - protein, 5 aa, Homo sapiens
NWGER

SEQ ID NO: 21327 - protein, 5 aa, Homo sapiens
PALPT

SEQ ID NO: 21328 - protein, 5 aa, Homo sapiens
PMHSN

SEQ ID NO: 21329 - protein, 5 aa, Homo sapiens
PPKPM

SEQ ID NO: 21330 - protein, 5 aa, Homo sapiens
VPGPP

SEQ ID NO: 21331 - protein, 5 aa, Homo sapiens
EPDQI

SEQ ID NO: 21332 - protein, 5 aa, Homo sapiens
CPSQA

SEQ ID NO: 21333 - protein, 5 aa, Homo sapiens
IGPLW

SEQ ID NO: 21334 - protein, 5 aa, Homo sapiens
FKGIL

SEQ ID NO: 21335 - protein, 5 aa, Homo sapiens
VYSLP

SEQ ID NO: 21336 - protein, 5 aa, Homo sapiens
KLHVL

SEQ ID NO: 21337 - protein, 5 aa, Homo sapiens
ATVIH

SEQ ID NO: 21338 - protein, 5 aa, Homo sapiens
DVYQE

SEQ ID NO: 21339 - protein, 5 aa, Homo sapiens
SDIDI

SEQ ID NO: 21340 - protein, 5 aa, Homo sapiens
LALPR

SEQ ID NO: 21341 - protein, 5 aa, Homo sapiens
LAEFY

SEQ ID NO: 21342 - protein, 5 aa, Homo sapiens
HTHMC

SEQ ID NO: 21343 - protein, 5 aa, Homo sapiens
KVGAG

SEQ ID NO: 21344 - protein, 5 aa, Homo sapiens
SLKLV

SEQ ID NO: 21345 - protein, 5 aa, Homo sapiens
ESPLA

SEQ ID NO: 21346 - protein, 5 aa, Homo sapiens
TLAIH

SEQ ID NO: 21347 - protein, 5 aa, Homo sapiens
AVARH

SEQ ID NO: 21348 - protein, 5 aa, Homo sapiens
TLAIH

SEQ ID NO: 21349 - protein, 5 aa, Homo sapiens
LDIGC

SEQ ID NO: 21350 - protein, 5 aa, Homo sapiens
PSSIN

SEQ ID NO: 21351 - protein, 5 aa, Homo sapiens
IKIHK

SEQ ID NO: 21352 - protein, 5 aa, Homo sapiens
IGSKG

SEQ ID NO: 21353 - protein, 5 aa, Homo sapiens
FFLER

SEQ ID NO: 21354 - protein, 5 aa, Homo sapiens
PFTQE

SEQ ID NO: 21355 - protein, 5 aa, Homo sapiens
GPEAW

SEQ ID NO: 21356 - protein, 5 aa, Homo sapiens
LKRKY

SEQ ID NO: 21357 - protein, 5 aa, Homo sapiens
YTSSK

SEQ ID NO: 21358 - protein, 5 aa, Homo sapiens
QRSLA

SEQ ID NO: 21359 - protein, 5 aa, Homo sapiens
LEAKV

SEQ ID NO: 21360 - protein, 5 aa, Homo sapiens
RQQNL

SEQ ID NO: 21361 - protein, 5 aa, Homo sapiens
GPLQW

SEQ ID NO: 21362 - protein, 5 aa, Homo sapiens
ELSSY

SEQ ID NO: 21363 - protein, 5 aa, Homo sapiens
AKVFV

SEQ ID NO: 21364 - protein, 5 aa, Homo sapiens
VMTTV

SEQ ID NO: 21365 - protein, 5 aa, Homo sapiens
IAQQL

SEQ ID NO: 21366 - protein, 5 aa, Homo sapiens
PHYRH

SEQ ID NO: 21367 - protein, 5 aa, Homo sapiens
SSESP

SEQ ID NO: 21368 - protein, 5 aa, Homo sapiens
LEVDV

SEQ ID NO: 21369 - protein, 5 aa, Homo sapiens
LDAEV

SEQ ID NO: 21370 - protein, 5 aa, Homo sapiens
LGHHV

SEQ ID NO: 21371 - protein, 5 aa, Homo sapiens
AVMKT

SEQ ID NO: 21372 - protein, 5 aa, Homo sapiens
PYQED

SEQ ID NO: 21373 - protein, 5 aa, Homo sapiens
DCTMS

SEQ ID NO: 21374 - protein, 5 aa, Homo sapiens
TRREV

SEQ ID NO: 21375 - protein, 5 aa, Homo sapiens
LWAQY

SEQ ID NO: 21376 - protein, 5 aa, Homo sapiens
ASIRE

SEQ ID NO: 21377 - protein, 5 aa, Homo sapiens
GEKAS

SEQ ID NO: 21378 - protein, 5 aa, Homo sapiens
LLELG

SEQ ID NO: 21379 - protein, 5 aa, Homo sapiens
RLRTF

SEQ ID NO: 21380 - protein, 5 aa, Homo sapiens
GDLCV

SEQ ID NO: 21381 - protein, 5 aa, Homo sapiens
RIRLS

SEQ ID NO: 21382 - protein, 5 aa, Homo sapiens
EETKS

SEQ ID NO: 21383 - protein, 5 aa, Homo sapiens
REKPQ

SEQ ID NO: 21384 - protein, 5 aa, Homo sapiens
PQPCG

SEQ ID NO: 21385 - protein, 5 aa, Homo sapiens
SYMHS

SEQ ID NO: 21386 - protein, 5 aa, Homo sapiens
CTDEE

SEQ ID NO: 21387 - protein, 5 aa, Homo sapiens
QRIHI

SEQ ID NO: 21388 - protein, 5 aa, Homo sapiens
SRSHL

SEQ ID NO: 21389 - protein, 5 aa, Homo sapiens
GRSGT

SEQ ID NO: 21390 - protein, 5 aa, Homo sapiens
QNLYW

SEQ ID NO: 21391 - protein, 5 aa, Homo sapiens
GYLMG

SEQ ID NO: 21392 - protein, 5 aa, Homo sapiens
GLPPV

SEQ ID NO: 21393 - protein, 5 aa, Homo sapiens
FPGKI

SEQ ID NO: 21394 - protein, 5 aa, Homo sapiens
KAILS

SEQ ID NO: 21395 - protein, 5 aa, Homo sapiens
RRETV

SEQ ID NO: 21396 - protein, 5 aa, Homo sapiens
GHSTV

SEQ ID NO: 21397 - protein, 5 aa, Homo sapiens
ELEKQ

SEQ ID NO: 21398 - protein, 5 aa, Homo sapiens
IQYDD

SEQ ID NO: 21399 - protein, 5 aa, Homo sapiens
ETVQK

SEQ ID NO: 21400 - protein, 5 aa, Homo sapiens
ENGKL

SEQ ID NO: 21401 - protein, 5 aa, Homo sapiens
LGPPQ

SEQ ID NO: 21402 - protein, 5 aa, Homo sapiens
LASLL

SEQ ID NO: 21403 - protein, 5 aa, Homo sapiens
TDDKL

SEQ ID NO: 21404 - protein, 5 aa, Homo sapiens
GNLAP

SEQ ID NO: 21405 - protein, 5 aa, Homo sapiens
LLLDF

SEQ ID NO: 21406 - protein, 5 aa, Homo sapiens
GLSQY

SEQ ID NO: 21407 - protein, 5 aa, Homo sapiens
EDDDL

SEQ ID NO: 21408 - protein, 5 aa, Homo sapiens
ENLYN

SEQ ID NO: 21409 - protein, 5 aa, Homo sapiens
RGPAR

SEQ ID NO: 21410 - protein, 5 aa, Homo sapiens
LRGGV

SEQ ID NO: 21411 - protein, 5 aa, Homo sapiens
HWPGI

SEQ ID NO: 21412 - protein, 5 aa, Homo sapiens
VLSIS

SEQ ID NO: 21413 - protein, 5 aa, Homo sapiens
DSQKF

SEQ ID NO: 21414 - protein, 5 aa, Homo sapiens
LSDDD

SEQ ID NO: 21415 - protein, 5 aa, Homo sapiens
PQLCL

SEQ ID NO: 21416 - protein, 5 aa, Homo sapiens
HATEP

SEQ ID NO: 21417 - protein, 5 aa, Homo sapiens
DDKFF

SEQ ID NO: 21418 - protein, 5 aa, Homo sapiens
STKRH

SEQ ID NO: 21419 - protein, 5 aa, Homo sapiens
FHYKH

SEQ ID NO: 21420 - protein, 5 aa, Homo sapiens
SHISI

SEQ ID NO: 21421 - protein, 5 aa, Homo sapiens
SELKT

SEQ ID NO: 21422 - protein, 5 aa, Homo sapiens
RWRFC

SEQ ID NO: 21423 - protein, 5 aa, Homo sapiens
SPVLW

SEQ ID NO: 21424 - protein, 5 aa, Homo sapiens
RQRTY

SEQ ID NO: 21425 - protein, 5 aa, Homo sapiens
DGFQL

SEQ ID NO: 21426 - protein, 5 aa, Homo sapiens
QQAAA

SEQ ID NO: 21427 - protein, 5 aa, Homo sapiens
DQSSV

SEQ ID NO: 21428 - protein, 5 aa, Homo sapiens
GSRRF

SEQ ID NO: 21429 - protein, 5 aa, Homo sapiens
WFRSR

SEQ ID NO: 21430 - protein, 5 aa, Homo sapiens
KDTVS

SEQ ID NO: 21431 - protein, 5 aa, Homo sapiens
MALCH

SEQ ID NO: 21432 - protein, 5 aa, Homo sapiens
NGGAE

SEQ ID NO: 21433 - protein, 5 aa, Homo sapiens
SQTVT

SEQ ID NO: 21434 - protein, 5 aa, Homo sapiens
TFRSA

SEQ ID NO: 21435 - protein, 5 aa, Homo sapiens
KKGKQ

SEQ ID NO: 21436 - protein, 5 aa, Homo sapiens
LPHEA

SEQ ID NO: 21437 - protein, 5 aa, Homo sapiens
EDTEL

SEQ ID NO: 21438 - protein, 5 aa, Homo sapiens
CVWQG

SEQ ID NO: 21439 - protein, 5 aa, Homo sapiens
QKSFR

SEQ ID NO: 21440 - protein, 5 aa, Homo sapiens
CCSFM

SEQ ID NO: 21441 - protein, 5 aa, Homo sapiens
PETND

SEQ ID NO: 21442 - protein, 5 aa, Homo sapiens
APPGR

SEQ ID NO: 21443 - protein, 5 aa, Homo sapiens
HYNGL

SEQ ID NO: 21444 - protein, 5 aa, Homo sapiens
LCVIQ

SEQ ID NO: 21445 - protein, 5 aa, Homo sapiens
PPKSK

SEQ ID NO: 21446 - protein, 5 aa, Homo sapiens
GGCRL

SEQ ID NO: 21447 - protein, 5 aa, Homo sapiens
PDADE

SEQ ID NO: 21448 - protein, 5 aa, Homo sapiens
YFCII

SEQ ID NO: 21449 - protein, 5 aa, Homo sapiens
DRVVF

SEQ ID NO: 21450 - protein, 5 aa, Homo sapiens
CSMDD

SEQ ID NO: 21451 - protein, 5 aa, Homo sapiens
TTHLI

SEQ ID NO: 21452 - protein, 5 aa, Homo sapiens
QPRET

SEQ ID NO: 21453 - protein, 5 aa, Homo sapiens
KRKKT

SEQ ID NO: 21454 - protein, 5 aa, Homo sapiens
AEECV

SEQ ID NO: 21455 - protein, 5 aa, Homo sapiens
FGCSQ

SEQ ID NO: 21456 - protein, 5 aa, Homo sapiens
IQARG

SEQ ID NO: 21457 - protein, 5 aa, Homo sapiens
ALIVE

SEQ ID NO: 21458 - protein, 5 aa, Homo sapiens
AHSQS

SEQ ID NO: 21459 - protein, 5 aa, Homo sapiens
AHSQG

SEQ ID NO: 21460 - protein, 5 aa, Homo sapiens
AHPQR

SEQ ID NO: 21461 - protein, 5 aa, Homo sapiens
WSKST

SEQ ID NO: 21462 - protein, 5 aa, Homo sapiens
YQGRR

SEQ ID NO: 21463 - protein, 5 aa, Homo sapiens
GFAVE

SEQ ID NO: 21464 - protein, 5 aa, Homo sapiens
TFKVS

SEQ ID NO: 21465 - protein, 5 aa, Homo sapiens
HPGQE

SEQ ID NO: 21466 - protein, 5 aa, Homo sapiens
DMPAA

SEQ ID NO: 21467 - protein, 5 aa, Homo sapiens
TVFKI

SEQ ID NO: 21468 - protein, 5 aa, Homo sapiens
ASDLL

SEQ ID NO: 21469 - protein, 5 aa, Homo sapiens
MTLGT

SEQ ID NO: 21470 - protein, 5 aa, Homo sapiens
ACSIM

SEQ ID NO: 21471 - protein, 5 aa, Homo sapiens
SSDTD

SEQ ID NO: 21472 - protein, 5 aa, Homo sapiens
PLRPC

SEQ ID NO: 21473 - protein, 5 aa, Homo sapiens
GKADL

SEQ ID NO: 21474 - protein, 5 aa, Homo sapiens
EESHA

SEQ ID NO: 21475 - protein, 5 aa, Homo sapiens
EAQAK

SEQ ID NO: 21476 - protein, 5 aa, Homo sapiens
GSCGF

SEQ ID NO: 21477 - protein, 5 aa, Homo sapiens
SCGCP

SEQ ID NO: 21478 - protein, 5 aa, Homo sapiens
SKLAT

SEQ ID NO: 21479 - protein, 5 aa, Homo sapiens
TQMPH

SEQ ID NO: 21480 - protein, 5 aa, Homo sapiens
ARDPK

SEQ ID NO: 21481 - protein, 5 aa, Homo sapiens
TLIDL

SEQ ID NO: 21482 - protein, 5 aa, Homo sapiens
GISTT

SEQ ID NO: 21483 - protein, 5 aa, Homo sapiens
ISLLK

SEQ ID NO: 21484 - protein, 5 aa, Homo sapiens
GSVEV

SEQ ID NO: 21485 - protein, 5 aa, Homo sapiens
PSTVN

SEQ ID NO: 21486 - protein, 5 aa, Homo sapiens
KLHQP

SEQ ID NO: 21487 - protein, 5 aa, Homo sapiens
HNEWP

SEQ ID NO: 21488 - protein, 5 aa, Homo sapiens
SKKCF

SEQ ID NO: 21489 - protein, 5 aa, Homo sapiens
WYNKT

SEQ ID NO: 21490 - protein, 5 aa, Homo sapiens
KVRPA

SEQ ID NO: 21491 - protein, 5 aa, Homo sapiens
YCVLQ

SEQ ID NO: 21492 - protein, 5 aa, Homo sapiens
KKKKR

SEQ ID NO: 21493 - protein, 5 aa, Homo sapiens
SSEDD

SEQ ID NO: 21494 - protein, 5 aa, Homo sapiens
GGGKG

SEQ ID NO: 21495 - protein, 5 aa, Homo sapiens
RPPHS

SEQ ID NO: 21496 - protein, 5 aa, Homo sapiens
CRRAY

SEQ ID NO: 21497 - protein, 5 aa, Homo sapiens
SVRRH

SEQ ID NO: 21498 - protein, 5 aa, Homo sapiens
NPKQA

SEQ ID NO: 21499 - protein, 5 aa, Homo sapiens
EKMLD

SEQ ID NO: 21500 - protein, 5 aa, Homo sapiens
KTSHV

SEQ ID NO: 21501 - protein, 5 aa, Homo sapiens
GTLVS

SEQ ID NO: 21502 - protein, 5 aa, Homo sapiens
REESG

SEQ ID NO: 21503 - protein, 5 aa, Homo sapiens
NNAVV

SEQ ID NO: 21504 - protein, 5 aa, Homo sapiens
LFPGN

SEQ ID NO: 21505 - protein, 5 aa, Homo sapiens
PEEDE

SEQ ID NO: 21506 - protein, 5 aa, Homo sapiens
RFTSS

SEQ ID NO: 21507 - protein, 5 aa, Homo sapiens
SRPPR

SEQ ID NO: 21508 - protein, 5 aa, Homo sapiens
AKGIF

SEQ ID NO: 21509 - protein, 5 aa, Homo sapiens
ASPHS

SEQ ID NO: 21510 - protein, 5 aa, Homo sapiens
PTPKS

SEQ ID NO: 21511 - protein, 5 aa, Homo sapiens
DWVYE

SEQ ID NO: 21512 - protein, 5 aa, Homo sapiens
MPGRM

SEQ ID NO: 21513 - protein, 5 aa, Homo sapiens
PSKLI

SEQ ID NO: 21514 - protein, 5 aa, Homo sapiens
PGHSL

SEQ ID NO: 21515 - protein, 5 aa, Homo sapiens
SEDEL

SEQ ID NO: 21516 - protein, 5 aa, Homo sapiens
LDSAD

SEQ ID NO: 21517 - protein, 5 aa, Homo sapiens
LVAML

SEQ ID NO: 21518 - protein, 5 aa, Homo sapiens
IPSIL

SEQ ID NO: 21519 - protein, 5 aa, Homo sapiens
IEATA

SEQ ID NO: 21520 - protein, 5 aa, Homo sapiens
WSGLR

SEQ ID NO: 21521 - protein, 5 aa, Homo sapiens
LYPRC

SEQ ID NO: 21522 - protein, 5 aa, Homo sapiens
KIYEV

SEQ ID NO: 21523 - protein, 5 aa, Homo sapiens
QIQRM

SEQ ID NO: 21524 - protein, 5 aa, Homo sapiens
CGKDI

SEQ ID NO: 21525 - protein, 5 aa, Homo sapiens
FIVRI

SEQ ID NO: 21526 - protein, 5 aa, Homo sapiens
SFLPT

SEQ ID NO: 21527 - protein, 5 aa, Homo sapiens
EVEER

SEQ ID NO: 21528 - protein, 5 aa, Homo sapiens
AGKQH

SEQ ID NO: 21529 - protein, 5 aa, Homo sapiens
MALSS

SEQ ID NO: 21530 - protein, 5 aa, Homo sapiens
LTYFP

SEQ ID NO: 21531 - protein, 5 aa, Homo sapiens
TFTWW

SEQ ID NO: 21532 - protein, 5 aa, Homo sapiens
QLAAA

SEQ ID NO: 21533 - protein, 5 aa, Homo sapiens
LFFFT

SEQ ID NO: 21534 - protein, 5 aa, Homo sapiens
RERNN

SEQ ID NO: 21535 - protein, 5 aa, Homo sapiens
SSTAS

SEQ ID NO: 21536 - protein, 5 aa, Homo sapiens
SAERS

SEQ ID NO: 21537 - protein, 5 aa, Homo sapiens
SEDLE

SEQ ID NO: 21538 - protein, 5 aa, Homo sapiens
QLNNR

SEQ ID NO: 21539 - protein, 5 aa, Homo sapiens
TIPEK

SEQ ID NO: 21540 - protein, 5 aa, Homo sapiens
KRIIF

SEQ ID NO: 21541 - protein, 5 aa, Homo sapiens
PQSWQ

SEQ ID NO: 21542 - protein, 5 aa, Homo sapiens
IFNIF

SEQ ID NO: 21543 - protein, 5 aa, Homo sapiens
CPLDV

SEQ ID NO: 21544 - protein, 5 aa, Homo sapiens
LNTKL

SEQ ID NO: 21545 - protein, 5 aa, Homo sapiens
YSTCL

SEQ ID NO: 21546 - protein, 5 aa, Homo sapiens
FEGGD

SEQ ID NO: 21547 - protein, 5 aa, Homo sapiens
KGITL

SEQ ID NO: 21548 - protein, 5 aa, Homo sapiens
TSSWR

SEQ ID NO: 21549 - protein, 5 aa, Homo sapiens
TPDLR

SEQ ID NO: 21550 - protein, 5 aa, Homo sapiens
KYTIR

SEQ ID NO: 21551 - protein, 5 aa, Homo sapiens
LLRNV

SEQ ID NO: 21552 - protein, 5 aa, Homo sapiens
QEPAL

SEQ ID NO: 21553 - protein, 5 aa, Homo sapiens
QNGES

SEQ ID NO: 21554 - protein, 5 aa, Homo sapiens
FPAPL

SEQ ID NO: 21555 - protein, 5 aa, Homo sapiens
KEQIP

SEQ ID NO: 21556 - protein, 5 aa, Homo sapiens
EKHRK

SEQ ID NO: 21557 - protein, 5 aa, Homo sapiens
KDFDV

SEQ ID NO: 21558 - protein, 5 aa, Homo sapiens
GHVAA

SEQ ID NO: 21559 - protein, 5 aa, Homo sapiens
SLPGH

SEQ ID NO: 21560 - protein, 5 aa, Homo sapiens
CRGAE

SEQ ID NO: 21561 - protein, 5 aa, Homo sapiens
VPKPH

SEQ ID NO: 21562 - protein, 5 aa, Homo sapiens
LGGFS

SEQ ID NO: 21563 - protein, 5 aa, Homo sapiens
SPGTP

SEQ ID NO: 21564 - protein, 5 aa, Homo sapiens
KLNKV

SEQ ID NO: 21565 - protein, 5 aa, Homo sapiens
LTGSF

SEQ ID NO: 21566 - protein, 5 aa, Homo sapiens
SVTTV

SEQ ID NO: 21567 - protein, 5 aa, Homo sapiens
AGSLV

SEQ ID NO: 21568 - protein, 5 aa, Homo sapiens
DQEHA

SEQ ID NO: 21569 - protein, 5 aa, Homo sapiens
LGKMH

SEQ ID NO: 21570 - protein, 5 aa, Homo sapiens
HVSDG

SEQ ID NO: 21571 - protein, 5 aa, Homo sapiens
TPVEN

SEQ ID NO: 21572 - protein, 5 aa, Homo sapiens
PGHVD

SEQ ID NO: 21573 - protein, 5 aa, Homo sapiens
RELSQ

SEQ ID NO: 21574 - protein, 5 aa, Homo sapiens
TSLFP

SEQ ID NO: 21575 - protein, 5 aa, Homo sapiens
VNGPV

SEQ ID NO: 21576 - protein, 5 aa, Homo sapiens
TYISR

SEQ ID NO: 21577 - protein, 5 aa, Homo sapiens
PVQKV

SEQ ID NO: 21578 - protein, 5 aa, Homo sapiens
STGPL

SEQ ID NO: 21579 - protein, 5 aa, Homo sapiens
EWVCL

SEQ ID NO: 21580 - protein, 5 aa, Homo sapiens
QIPVF

SEQ ID NO: 21581 - protein, 5 aa, Homo sapiens
QPPKW

SEQ ID NO: 21582 - protein, 5 aa, Homo sapiens
QPADL

SEQ ID NO: 21583 - protein, 5 aa, Homo sapiens
GQDSQ

SEQ ID NO: 21584 - protein, 5 aa, Homo sapiens
KRKML

SEQ ID NO: 21585 - protein, 5 aa, Homo sapiens
VLAPY

SEQ ID NO: 21586 - protein, 5 aa, Homo sapiens
SCTII

SEQ ID NO: 21587 - protein, 5 aa, Homo sapiens
SADDV

SEQ ID NO: 21588 - protein, 5 aa, Homo sapiens
QDRVP

SEQ ID NO: 21589 - protein, 5 aa, Homo sapiens
ASKRS

SEQ ID NO: 21590 - protein, 5 aa, Homo sapiens
QESWK

SEQ ID NO: 21591 - protein, 5 aa, Homo sapiens
PRVSV

SEQ ID NO: 21592 - protein, 5 aa, Homo sapiens
EPTPM

SEQ ID NO: 21593 - protein, 5 aa, Homo sapiens
GAHGF

SEQ ID NO: 21594 - protein, 5 aa, Homo sapiens
THFLL

SEQ ID NO: 21595 - protein, 5 aa, Homo sapiens
VFSQL

SEQ ID NO: 21596 - protein, 5 aa, Homo sapiens
KEKRR

SEQ ID NO: 21597 - protein, 5 aa, Homo sapiens
TSPES

SEQ ID NO: 21598 - protein, 5 aa, Homo sapiens
DPNEV

SEQ ID NO: 21599 - protein, 5 aa, Homo sapiens
GCFDR

SEQ ID NO: 21600 - protein, 5 aa, Homo sapiens
SKRLA

SEQ ID NO: 21601 - protein, 5 aa, Homo sapiens
PGGRF

SEQ ID NO: 21602 - protein, 5 aa, Homo sapiens
SIAEP

SEQ ID NO: 21603 - protein, 5 aa, Homo sapiens
NSFVR

SEQ ID NO: 21604 - protein, 5 aa, Homo sapiens
SRLIS

SEQ ID NO: 21605 - protein, 5 aa, Homo sapiens
NTFGY

SEQ ID NO: 21606 - protein, 5 aa, Homo sapiens
QPSCC

SEQ ID NO: 21607 - protein, 5 aa, Homo sapiens
DTGTF

SEQ ID NO: 21608 - protein, 5 aa, Homo sapiens
ASSCC

SEQ ID NO: 21609 - protein, 5 aa, Homo sapiens
RTSSC

SEQ ID NO: 21610 - protein, 5 aa, Homo sapiens
CEPRC

SEQ ID NO: 21611 - protein, 5 aa, Homo sapiens
ISSKI

SEQ ID NO: 21612 - protein, 5 aa, Homo sapiens
TAELP

SEQ ID NO: 21613 - protein, 5 aa, Homo sapiens
EIPAK

SEQ ID NO: 21614 - protein, 5 aa, Homo sapiens
EIPAK

SEQ ID NO: 21615 - protein, 5 aa, Homo sapiens
DKGSS

SEQ ID NO: 21616 - protein, 5 aa, Homo sapiens
GVATN

SEQ ID NO: 21617 - protein, 5 aa, Homo sapiens
IKFGH

SEQ ID NO: 21618 - protein, 5 aa, Homo sapiens
VGGKR

SEQ ID NO: 21619 - protein, 5 aa, Homo sapiens
YQSSK

SEQ ID NO: 21620 - protein, 5 aa, Homo sapiens
KGSSS

SEQ ID NO: 21621 - protein, 5 aa, Homo sapiens
PLPSA

SEQ ID NO: 21622 - protein, 5 aa, Homo sapiens
RGQHT

SEQ ID NO: 21623 - protein, 5 aa, Homo sapiens
IDDRK

SEQ ID NO: 21624 - protein, 5 aa, Homo sapiens
GQHGH

SEQ ID NO: 21625 - protein, 5 aa, Homo sapiens
VKPFS

SEQ ID NO: 21626 - protein, 5 aa, Homo sapiens
EMKKP

SEQ ID NO: 21627 - protein, 5 aa, Homo sapiens
FAEVT

SEQ ID NO: 21628 - protein, 5 aa, Homo sapiens
NPPPA

SEQ ID NO: 21629 - protein, 5 aa, Homo sapiens
SVGKE

SEQ ID NO: 21630 - protein, 5 aa, Homo sapiens
IKILY

SEQ ID NO: 21631 - protein, 5 aa, Homo sapiens
PNTYH

SEQ ID NO: 21632 - protein, 5 aa, Homo sapiens
NVRKT

SEQ ID NO: 21633 - protein, 5 aa, Homo sapiens
KSKRK

SEQ ID NO: 21634 - protein, 5 aa, Homo sapiens
PCVIL

SEQ ID NO: 21635 - protein, 5 aa, Homo sapiens
KTKNS

SEQ ID NO: 21636 - protein, 5 aa, Homo sapiens
GFAVE

SEQ ID NO: 21637 - protein, 5 aa, Homo sapiens
GCRLY

SEQ ID NO: 21638 - protein, 5 aa, Homo sapiens
TNIQS

SEQ ID NO: 21639 - protein, 5 aa, Homo sapiens
GKAVK

SEQ ID NO: 21640 - protein, 5 aa, Homo sapiens
SVKKI

SEQ ID NO: 21641 - protein, 5 aa, Homo sapiens
VYVLW

SEQ ID NO: 21642 - protein, 5 aa, Homo sapiens
SEPGT

SEQ ID NO: 21643 - protein, 5 aa, Homo sapiens
RGLTI

SEQ ID NO: 21644 - protein, 5 aa, Homo sapiens
MEVSC

SEQ ID NO: 21645 - protein, 5 aa, Homo sapiens
QLNGN

SEQ ID NO: 21646 - protein, 5 aa, Homo sapiens
FFLVH

SEQ ID NO: 21647 - protein, 5 aa, Homo sapiens
IGGGP

SEQ ID NO: 21648 - protein, 5 aa, Homo sapiens
AEQYV

SEQ ID NO: 21649 - protein, 5 aa, Homo sapiens
ILFAM

SEQ ID NO: 21650 - protein, 5 aa, Homo sapiens
LPDLL

SEQ ID NO: 21651 - protein, 5 aa, Homo sapiens
PVCFK

SEQ ID NO: 21652 - protein, 5 aa, Homo sapiens
RKNPL

SEQ ID NO: 21653 - protein, 5 aa, Homo sapiens
QDKVN

SEQ ID NO: 21654 - protein, 5 aa, Homo sapiens
GESDL

SEQ ID NO: 21655 - protein, 5 aa, Homo sapiens
IYLVH

SEQ ID NO: 21656 - protein, 5 aa, Homo sapiens
VVNTR

SEQ ID NO: 21657 - protein, 5 aa, Homo sapiens
ENTAF

SEQ ID NO: 21658 - protein, 5 aa, Homo sapiens
NHYRR

SEQ ID NO: 21659 - protein, 5 aa, Homo sapiens
QDHPE

SEQ ID NO: 21660 - protein, 5 aa, Homo sapiens
ICEWQ

SEQ ID NO: 21661 - protein, 5 aa, Homo sapiens
CSCCD

SEQ ID NO: 21662 - protein, 5 aa, Homo sapiens
SAWQL

SEQ ID NO: 21663 - protein, 5 aa, Homo sapiens
RNRPY

SEQ ID NO: 21664 - protein, 5 aa, Homo sapiens
SSKVQ

SEQ ID NO: 21665 - protein, 5 aa, Homo sapiens
SGCKS

SEQ ID NO: 21666 - protein, 5 aa, Homo sapiens
GTEEV

SEQ ID NO: 21667 - protein, 5 aa, Homo sapiens
QNLKP

SEQ ID NO: 21668 - protein, 5 aa, Homo sapiens
RGRGH

SEQ ID NO: 21669 - protein, 5 aa, Homo sapiens
GMSDI

SEQ ID NO: 21670 - protein, 5 aa, Homo sapiens
CVMSV

SEQ ID NO: 21671 - protein, 5 aa, Homo sapiens
LNEKN

SEQ ID NO: 21672 - protein, 5 aa, Homo sapiens
FSIRY

SEQ ID NO: 21673 - protein, 5 aa, Homo sapiens
TALQG

SEQ ID NO: 21674 - protein, 5 aa, Homo sapiens
SQGLP

SEQ ID NO: 21675 - protein, 5 aa, Homo sapiens
LRPYK

SEQ ID NO: 21676 - protein, 5 aa, Homo sapiens
GPGGS

SEQ ID NO: 21677 - protein, 5 aa, Homo sapiens
PPFSE

SEQ ID NO: 21678 - protein, 5 aa, Homo sapiens
NSGIK

SEQ ID NO: 21679 - protein, 5 aa, Homo sapiens
HLKRT

SEQ ID NO: 21680 - protein, 5 aa, Homo sapiens
RSPNI

SEQ ID NO: 21681 - protein, 5 aa, Homo sapiens
AIQDG

SEQ ID NO: 21682 - protein, 5 aa, Homo sapiens
LLSTA

SEQ ID NO: 21683 - protein, 5 aa, Homo sapiens
AAPLQ

SEQ ID NO: 21684 - protein, 5 aa, Homo sapiens
FRWFF

SEQ ID NO: 21685 - protein, 5 aa, Homo sapiens
VPQGM

SEQ ID NO: 21686 - protein, 5 aa, Homo sapiens
QLPES

SEQ ID NO: 21687 - protein, 5 aa, Homo sapiens
GRSSR

SEQ ID NO: 21688 - protein, 5 aa, Homo sapiens
QKKET

SEQ ID NO: 21689 - protein, 5 aa, Homo sapiens
FPTSP

SEQ ID NO: 21690 - protein, 5 aa, Homo sapiens
GAGHQ

SEQ ID NO: 21691 - protein, 5 aa, Homo sapiens
SETAL

SEQ ID NO: 21692 - protein, 5 aa, Homo sapiens
SLKKH

SEQ ID NO: 21693 - protein, 5 aa, Homo sapiens
GALAE

SEQ ID NO: 21694 - protein, 5 aa, Homo sapiens
RLNAV

SEQ ID NO: 21695 - protein, 5 aa, Homo sapiens
NHTAQ

SEQ ID NO: 21696 - protein, 5 aa, Homo sapiens
KNNSS

SEQ ID NO: 21697 - protein, 5 aa, Homo sapiens
GLQEK

SEQ ID NO: 21698 - protein, 5 aa, Homo sapiens
FPQEA

SEQ ID NO: 21699 - protein, 5 aa, Homo sapiens
AIVGQ

SEQ ID NO: 21700 - protein, 5 aa, Homo sapiens
IPREL

SEQ ID NO: 21701 - protein, 5 aa, Homo sapiens
SSNIQ

SEQ ID NO: 21702 - protein, 5 aa, Homo sapiens
QCQTA

SEQ ID NO: 21703 - protein, 5 aa, Homo sapiens
VSASE

SEQ ID NO: 21704 - protein, 5 aa, Homo sapiens
LKLFG

SEQ ID NO: 21705 - protein, 5 aa, Homo sapiens
REKKQ

SEQ ID NO: 21706 - protein, 5 aa, Homo sapiens
PQDNV

SEQ ID NO: 21707 - protein, 5 aa, Homo sapiens
TANYF

SEQ ID NO: 21708 - protein, 5 aa, Homo sapiens
YHDEL

SEQ ID NO: 21709 - protein, 5 aa, Homo sapiens
SSVTP

SEQ ID NO: 21710 - protein, 5 aa, Homo sapiens
LDVWS

SEQ ID NO: 21711 - protein, 5 aa, Homo sapiens
CILLL

SEQ ID NO: 21712 - protein, 5 aa, Homo sapiens
RGYVK

SEQ ID NO: 21713 - protein, 5 aa, Homo sapiens
TGVQV

SEQ ID NO: 21714 - protein, 5 aa, Homo sapiens
KIGII

SEQ ID NO: 21715 - protein, 5 aa, Homo sapiens
DEDEE

SEQ ID NO: 21716 - protein, 5 aa, Homo sapiens
GPTAE

SEQ ID NO: 21717 - protein, 5 aa, Homo sapiens
GIRNT

SEQ ID NO: 21718 - protein, 5 aa, Homo sapiens
KAKRH

SEQ ID NO: 21719 - protein, 5 aa, Homo sapiens
QAGES

SEQ ID NO: 21720 - protein, 5 aa, Homo sapiens
LDQVN

SEQ ID NO: 21721 - protein, 5 aa, Homo sapiens
KFSPY

SEQ ID NO: 21722 - protein, 5 aa, Homo sapiens
RGTKF

SEQ ID NO: 21723 - protein, 5 aa, Homo sapiens
RGIQV

SEQ ID NO: 21724 - protein, 5 aa, Homo sapiens
GPLNY

SEQ ID NO: 21725 - protein, 5 aa, Homo sapiens
FEVKS

SEQ ID NO: 21726 - protein, 5 aa, Homo sapiens
NAHSS

SEQ ID NO: 21727 - protein, 5 aa, Homo sapiens
VTSQL

SEQ ID NO: 21728 - protein, 5 aa, Homo sapiens
HLSQR

SEQ ID NO: 21729 - protein, 5 aa, Homo sapiens
NTADH

SEQ ID NO: 21730 - protein, 5 aa, Homo sapiens
TSWSL

SEQ ID NO: 21731 - protein, 5 aa, Homo sapiens
NCLSQ

SEQ ID NO: 21732 - protein, 5 aa, Homo sapiens
SSEVN

SEQ ID NO: 21733 - protein, 5 aa, Homo sapiens
NGLIK

SEQ ID NO: 21734 - protein, 5 aa, Homo sapiens
FTRIR

SEQ ID NO: 21735 - protein, 5 aa, Homo sapiens
DSLLQ

SEQ ID NO: 21736 - protein, 5 aa, Homo sapiens
ESDGD

SEQ ID NO: 21737 - protein, 5 aa, Homo sapiens
FEHAT

SEQ ID NO: 21738 - protein, 5 aa, Homo sapiens
VEGEA

SEQ ID NO: 21739 - protein, 5 aa, Homo sapiens
LTKTP

SEQ ID NO: 21740 - protein, 5 aa, Homo sapiens
GEKKP

SEQ ID NO: 21741 - protein, 5 aa, Homo sapiens
RHYTS

SEQ ID NO: 21742 - protein, 5 aa, Homo sapiens
QGYLC

SEQ ID NO: 21743 - protein, 5 aa, Homo sapiens
SLASF

SEQ ID NO: 21744 - protein, 5 aa, Homo sapiens
GFSLI

SEQ ID NO: 21745 - protein, 5 aa, Homo sapiens
TKVFS

SEQ ID NO: 21746 - protein, 5 aa, Homo sapiens
SESTH

SEQ ID NO: 21747 - protein, 5 aa, Homo sapiens
TLLAS

SEQ ID NO: 21748 - protein, 5 aa, Homo sapiens
FEECG

SEQ ID NO: 21749 - protein, 5 aa, Homo sapiens
QTRPH

SEQ ID NO: 21750 - protein, 5 aa, Homo sapiens
KQQLA

SEQ ID NO: 21751 - protein, 5 aa, Homo sapiens
RRESF

SEQ ID NO: 21752 - protein, 5 aa, Homo sapiens
SNHAY

SEQ ID NO: 21753 - protein, 5 aa, Homo sapiens
AHPGD

SEQ ID NO: 21754 - protein, 5 aa, Homo sapiens
PTRKE

SEQ ID NO: 21755 - protein, 5 aa, Homo sapiens
QIKKM

SEQ ID NO: 21756 - protein, 5 aa, Homo sapiens
DSDSG

SEQ ID NO: 21757 - protein, 5 aa, Homo sapiens
CLKQH

SEQ ID NO: 21758 - protein, 5 aa, Homo sapiens
ENKEQ

SEQ ID NO: 21759 - protein, 5 aa, Homo sapiens
QAQQA

SEQ ID NO: 21760 - protein, 5 aa, Homo sapiens
HSPGF

SEQ ID NO: 21761 - protein, 5 aa, Homo sapiens
RPVSS

SEQ ID NO: 21762 - protein, 5 aa, Homo sapiens
MGEKS

SEQ ID NO: 21763 - protein, 5 aa, Homo sapiens
VPKIH

SEQ ID NO: 21764 - protein, 5 aa, Homo sapiens
TLCSV

SEQ ID NO: 21765 - protein, 5 aa, Homo sapiens
PQEVF

SEQ ID NO: 21766 - protein, 5 aa, Homo sapiens
FRSEL

SEQ ID NO: 21767 - protein, 5 aa, Homo sapiens
KEALM

SEQ ID NO: 21768 - protein, 5 aa, Homo sapiens
RFVHT

SEQ ID NO: 21769 - protein, 5 aa, Homo sapiens
ANGLA

SEQ ID NO: 21770 - protein, 5 aa, Homo sapiens
PAGHM

SEQ ID NO: 21771 - protein, 5 aa, Homo sapiens
AEEDY

SEQ ID NO: 21772 - protein, 5 aa, Homo sapiens
QSTSL

SEQ ID NO: 21773 - protein, 5 aa, Homo sapiens
SPKNC

SEQ ID NO: 21774 - protein, 5 aa, Homo sapiens
HLQPR

SEQ ID NO: 21775 - protein, 5 aa, Homo sapiens
LQELN

SEQ ID NO: 21776 - protein, 5 aa, Homo sapiens
PGRDY

SEQ ID NO: 21777 - protein, 5 aa, Homo sapiens
PHSYH

SEQ ID NO: 21778 - protein, 5 aa, Homo sapiens
THVQT

SEQ ID NO: 21779 - protein, 5 aa, Homo sapiens
YNWYD

SEQ ID NO: 21780 - protein, 5 aa, Homo sapiens
KHLAC

SEQ ID NO: 21781 - protein, 5 aa, Homo sapiens
NYLEG

SEQ ID NO: 21782 - protein, 5 aa, Homo sapiens
EESGE

SEQ ID NO: 21783 - protein, 5 aa, Homo sapiens
IIVGG

SEQ ID NO: 21784 - protein, 5 aa, Homo sapiens
VPLLV

SEQ ID NO: 21785 - protein, 5 aa, Homo sapiens
PQFHY

SEQ ID NO: 21786 - protein, 5 aa, Homo sapiens
LLGRV

SEQ ID NO: 21787 - protein, 5 aa, Homo sapiens
CQPPE

SEQ ID NO: 21788 - protein, 5 aa, Homo sapiens
KIRRA

SEQ ID NO: 21789 - protein, 5 aa, Homo sapiens
ASPHS

SEQ ID NO: 21790 - protein, 5 aa, Homo sapiens
QGKSM

SEQ ID NO: 21791 - protein, 5 aa, Homo sapiens
NPFLL

SEQ ID NO: 21792 - protein, 5 aa, Homo sapiens
PDPHA

SEQ ID NO: 21793 - protein, 5 aa, Homo sapiens
RGARR

SEQ ID NO: 21794 - protein, 5 aa, Homo sapiens
YAYFA

SEQ ID NO: 21795 - protein, 5 aa, Homo sapiens
MNLNL

SEQ ID NO: 21796 - protein, 5 aa, Homo sapiens
DIASN

SEQ ID NO: 21797 - protein, 5 aa, Homo sapiens
LQTSL

SEQ ID NO: 21798 - protein, 5 aa, Homo sapiens
ATPGE

SEQ ID NO: 21799 - protein, 5 aa, Homo sapiens
LPPQQ

SEQ ID NO: 21800 - protein, 5 aa, Homo sapiens
TTRKL

SEQ ID NO: 21801 - protein, 5 aa, Homo sapiens
LFKAS

SEQ ID NO: 21802 - protein, 5 aa, Homo sapiens
FLYKI

SEQ ID NO: 21803 - protein, 5 aa, Homo sapiens
PEGLL

SEQ ID NO: 21804 - protein, 5 aa, Homo sapiens
GKPKE

SEQ ID NO: 21805 - protein, 5 aa, Homo sapiens
LGHWV

SEQ ID NO: 21806 - protein, 5 aa, Homo sapiens
PPVNT

SEQ ID NO: 21807 - protein, 5 aa, Homo sapiens
GNKEN

SEQ ID NO: 21808 - protein, 5 aa, Homo sapiens
RAENS

SEQ ID NO: 21809 - protein, 5 aa, Homo sapiens
PGTWK

SEQ ID NO: 21810 - protein, 5 aa, Homo sapiens
SPGDV

SEQ ID NO: 21811 - protein, 5 aa, Homo sapiens
FLHWL

SEQ ID NO: 21812 - protein, 5 aa, Homo sapiens
GGESM

SEQ ID NO: 21813 - protein, 5 aa, Homo sapiens
KPKDD

SEQ ID NO: 21814 - protein, 5 aa, Homo sapiens
AKHRN

SEQ ID NO: 21815 - protein, 5 aa, Homo sapiens
HKEKN

SEQ ID NO: 21816 - protein, 5 aa, Homo sapiens
SLITV

SEQ ID NO: 21817 - protein, 5 aa, Homo sapiens
STVEF

SEQ ID NO: 21818 - protein, 5 aa, Homo sapiens
SDSDD

SEQ ID NO: 21819 - protein, 5 aa, Homo sapiens
SKFPS

SEQ ID NO: 21820 - protein, 5 aa, Homo sapiens
LLEFK

SEQ ID NO: 21821 - protein, 5 aa, Homo sapiens
DSRRH

SEQ ID NO: 21822 - protein, 5 aa, Homo sapiens
PAPTQ

SEQ ID NO: 21823 - protein, 5 aa, Homo sapiens
TFGLE

SEQ ID NO: 21824 - protein, 5 aa, Homo sapiens
DRPRL

SEQ ID NO: 21825 - protein, 5 aa, Homo sapiens
PTVRY

SEQ ID NO: 21826 - protein, 5 aa, Homo sapiens
CCSIM

SEQ ID NO: 21827 - protein, 5 aa, Homo sapiens
LLHYN

SEQ ID NO: 21828 - protein, 5 aa, Homo sapiens
IKRGR

SEQ ID NO: 21829 - protein, 5 aa, Homo sapiens
LLSYS

SEQ ID NO: 21830 - protein, 5 aa, Homo sapiens
ETTHF

SEQ ID NO: 21831 - protein, 5 aa, Homo sapiens
ARNQT

SEQ ID NO: 21832 - protein, 5 aa, Homo sapiens
HHEWP

SEQ ID NO: 21833 - protein, 5 aa, Homo sapiens
HCLWR

SEQ ID NO: 21834 - protein, 5 aa, Homo sapiens
GEVTT

SEQ ID NO: 21835 - protein, 5 aa, Homo sapiens
LHAGE

SEQ ID NO: 21836 - protein, 5 aa, Homo sapiens
THLVE

SEQ ID NO: 21837 - protein, 5 aa, Homo sapiens
LSAAT

SEQ ID NO: 21838 - protein, 5 aa, Homo sapiens
PIGKP

SEQ ID NO: 21839 - protein, 5 aa, Homo sapiens
PILMT

SEQ ID NO: 21840 - protein, 5 aa, Homo sapiens
KEKAT

SEQ ID NO: 21841 - protein, 5 aa, Homo sapiens
SLREP

SEQ ID NO: 21842 - protein, 5 aa, Homo sapiens
HSASA

SEQ ID NO: 21843 - protein, 5 aa, Homo sapiens
WRKTY

SEQ ID NO: 21844 - protein, 5 aa, Homo sapiens
LKHQL

SEQ ID NO: 21845 - protein, 5 aa, Homo sapiens
TLTFQ

SEQ ID NO: 21846 - protein, 5 aa, Homo sapiens
TDWEN

SEQ ID NO: 21847 - protein, 5 aa, Homo sapiens
FIFVK

SEQ ID NO: 21848 - protein, 5 aa, Homo sapiens
MRPYK

SEQ ID NO: 21849 - protein, 5 aa, Homo sapiens
TAGRL

SEQ ID NO: 21850 - protein, 5 aa, Homo sapiens
QQLKL

SEQ ID NO: 21851 - protein, 5 aa, Homo sapiens
YQNQE

SEQ ID NO: 21852 - protein, 5 aa, Homo sapiens
LSHSL

SEQ ID NO: 21853 - protein, 5 aa, Homo sapiens
ATGCK

SEQ ID NO: 21854 - protein, 5 aa, Homo sapiens
ETTPR

SEQ ID NO: 21855 - protein, 5 aa, Homo sapiens
SPGSQ

SEQ ID NO: 21856 - protein, 5 aa, Homo sapiens
KFYGK

SEQ ID NO: 21857 - protein, 5 aa, Homo sapiens
FCKGT

SEQ ID NO: 21858 - protein, 5 aa, Homo sapiens
PQMSS

SEQ ID NO: 21859 - protein, 5 aa, Homo sapiens
RRKLN

SEQ ID NO: 21860 - protein, 5 aa, Homo sapiens
SRLEQ

SEQ ID NO: 21861 - protein, 5 aa, Homo sapiens
DTFWD

SEQ ID NO: 21862 - protein, 5 aa, Homo sapiens
PAAGI

SEQ ID NO: 21863 - protein, 5 aa, Homo sapiens
LKTHS

SEQ ID NO: 21864 - protein, 5 aa, Homo sapiens
VYFST

SEQ ID NO: 21865 - protein, 5 aa, Homo sapiens
GTLAG

SEQ ID NO: 21866 - protein, 5 aa, Homo sapiens
VLNFD

SEQ ID NO: 21867 - protein, 5 aa, Homo sapiens
TLAIH

SEQ ID NO: 21868 - protein, 5 aa, Homo sapiens
TKASE

SEQ ID NO: 21869 - protein, 5 aa, Homo sapiens
IYEKV

SEQ ID NO: 21870 - protein, 5 aa, Homo sapiens
LGTLK

SEQ ID NO: 21871 - protein, 5 aa, Homo sapiens
IYVDI

SEQ ID NO: 21872 - protein, 5 aa, Homo sapiens
SSSSC

SEQ ID NO: 21873 - protein, 5 aa, Homo sapiens
DAAGR

SEQ ID NO: 21874 - protein, 5 aa, Homo sapiens
PITKL

SEQ ID NO: 21875 - protein, 5 aa, Homo sapiens
GYPKK

SEQ ID NO: 21876 - protein, 5 aa, Homo sapiens
PTVIT

SEQ ID NO: 21877 - protein, 5 aa, Homo sapiens
EMSQQ

SEQ ID NO: 21878 - protein, 5 aa, Homo sapiens
GKAFN

SEQ ID NO: 21879 - protein, 5 aa, Homo sapiens
FILIS

SEQ ID NO: 21880 - protein, 5 aa, Homo sapiens
EKLHV

SEQ ID NO: 21881 - protein, 5 aa, Homo sapiens
NLVSL

SEQ ID NO: 21882 - protein, 5 aa, Homo sapiens
DSDSD

SEQ ID NO: 21883 - protein, 5 aa, Homo sapiens
ACYSL

SEQ ID NO: 21884 - protein, 5 aa, Homo sapiens
KQKQL

SEQ ID NO: 21885 - protein, 5 aa, Homo sapiens
CPTAE

SEQ ID NO: 21886 - protein, 5 aa, Homo sapiens
SHILT

SEQ ID NO: 21887 - protein, 5 aa, Homo sapiens
DEWRE

SEQ ID NO: 21888 - protein, 5 aa, Homo sapiens
FGRRD

SEQ ID NO: 21889 - protein, 5 aa, Homo sapiens
KGRRG

SEQ ID NO: 21890 - protein, 5 aa, Homo sapiens
IRRMN

SEQ ID NO: 21891 - protein, 5 aa, Homo sapiens
PVTQL

SEQ ID NO: 21892 - protein, 5 aa, Homo sapiens
QRTRG

SEQ ID NO: 21893 - protein, 5 aa, Homo sapiens
TAQNT

SEQ ID NO: 21894 - protein, 5 aa, Homo sapiens
TSGWG

SEQ ID NO: 21895 - protein, 5 aa, Homo sapiens
YYPQQ

SEQ ID NO: 21896 - protein, 5 aa, Homo sapiens
PLQML

SEQ ID NO: 21897 - protein, 5 aa, Homo sapiens
SSIIF

SEQ ID NO: 21898 - protein, 5 aa, Homo sapiens
TRKKQ

SEQ ID NO: 21899 - protein, 5 aa, Homo sapiens
VPQST

SEQ ID NO: 21900 - protein, 5 aa, Homo sapiens
KELQQ

SEQ ID NO: 21901 - protein, 5 aa, Homo sapiens
GVPGK

SEQ ID NO: 21902 - protein, 5 aa, Homo sapiens
LNGDT

SEQ ID NO: 21903 - protein, 5 aa, Homo sapiens
QWGTK

SEQ ID NO: 21904 - protein, 5 aa, Homo sapiens
ALTED

SEQ ID NO: 21905 - protein, 5 aa, Homo sapiens
PAGEE

SEQ ID NO: 21906 - protein, 5 aa, Homo sapiens
LASNS

SEQ ID NO: 21907 - protein, 5 aa, Homo sapiens
CTTFI

SEQ ID NO: 21908 - protein, 5 aa, Homo sapiens
RNGLE

SEQ ID NO: 21909 - protein, 5 aa, Homo sapiens
QQSKP

SEQ ID NO: 21910 - protein, 5 aa, Homo sapiens
GTYIM

SEQ ID NO: 21911 - protein, 5 aa, Homo sapiens
PGLDD

SEQ ID NO: 21912 - protein, 5 aa, Homo sapiens
RTHAD

SEQ ID NO: 21913 - protein, 5 aa, Homo sapiens
AQQRR

SEQ ID NO: 21914 - protein, 5 aa, Homo sapiens
SMKLY

SEQ ID NO: 21915 - protein, 5 aa, Homo sapiens
FGLPQ

SEQ ID NO: 21916 - protein, 5 aa, Homo sapiens
KHSMS

SEQ ID NO: 21917 - protein, 5 aa, Homo sapiens
QSYLD

SEQ ID NO: 21918 - protein, 5 aa, Homo sapiens
ASLST

SEQ ID NO: 21919 - protein, 5 aa, Homo sapiens
GGGCC

SEQ ID NO: 21920 - protein, 5 aa, Homo sapiens
SDDEF

SEQ ID NO: 21921 - protein, 5 aa, Homo sapiens
KITVW

SEQ ID NO: 21922 - protein, 5 aa, Homo sapiens
EFSRK

SEQ ID NO: 21923 - protein, 5 aa, Homo sapiens
ALAQG

SEQ ID NO: 21924 - protein, 5 aa, Homo sapiens
PSFSS

SEQ ID NO: 21925 - protein, 5 aa, Homo sapiens
RWKSR

SEQ ID NO: 21926 - protein, 5 aa, Homo sapiens
KKKKK

SEQ ID NO: 21927 - protein, 5 aa, Homo sapiens
IANKK

SEQ ID NO: 21928 - protein, 5 aa, Homo sapiens
VAQMG

SEQ ID NO: 21929 - protein, 5 aa, Homo sapiens
VCPSC

SEQ ID NO: 21930 - protein, 5 aa, Homo sapiens
VCPSC

SEQ ID NO: 21931 - protein, 5 aa, Homo sapiens
LYCPG

SEQ ID NO: 21932 - protein, 5 aa, Homo sapiens
HLASS

SEQ ID NO: 21933 - protein, 5 aa, Homo sapiens
ERKKK

SEQ ID NO: 21934 - protein, 5 aa, Homo sapiens
LRSKS

SEQ ID NO: 21935 - protein, 5 aa, Homo sapiens
AASEE

SEQ ID NO: 21936 - protein, 5 aa, Homo sapiens
GISDA

SEQ ID NO: 21937 - protein, 5 aa, Homo sapiens
LGSRL

SEQ ID NO: 21938 - protein, 5 aa, Homo sapiens
FELEA

SEQ ID NO: 21939 - protein, 5 aa, Homo sapiens
SNHQP

SEQ ID NO: 21940 - protein, 5 aa, Homo sapiens
KPSMY

SEQ ID NO: 21941 - protein, 5 aa, Homo sapiens
GSSNP

SEQ ID NO: 21942 - protein, 5 aa, Homo sapiens
WTRLL

SEQ ID NO: 21943 - protein, 5 aa, Homo sapiens
SCLSL

SEQ ID NO: 21944 - protein, 5 aa, Homo sapiens
EARRL

SEQ ID NO: 21945 - protein, 5 aa, Homo sapiens
GLSNS

SEQ ID NO: 21946 - protein, 5 aa, Homo sapiens
DVENL

SEQ ID NO: 21947 - protein, 5 aa, Homo sapiens
KRDYV

SEQ ID NO: 21948 - protein, 5 aa, Homo sapiens
KFWKR

SEQ ID NO: 21949 - protein, 5 aa, Homo sapiens
ACHIQ

SEQ ID NO: 21950 - protein, 5 aa, Homo sapiens
KRGKQ

SEQ ID NO: 21951 - protein, 5 aa, Homo sapiens
IYFFT

SEQ ID NO: 21952 - protein, 5 aa, Homo sapiens
AVGGK

SEQ ID NO: 21953 - protein, 5 aa, Homo sapiens
HASEP

SEQ ID NO: 21954 - protein, 5 aa, Homo sapiens
QSAPK

SEQ ID NO: 21955 - protein, 5 aa, Homo sapiens
ETAFE

SEQ ID NO: 21956 - protein, 5 aa, Homo sapiens
HCTRP

SEQ ID NO: 21957 - protein, 5 aa, Homo sapiens
FFAFF

SEQ ID NO: 21958 - protein, 5 aa, Homo sapiens
VCRCL

SEQ ID NO: 21959 - protein, 5 aa, Homo sapiens
ASLKK

SEQ ID NO: 21960 - protein, 5 aa, Homo sapiens
YKASD

SEQ ID NO: 21961 - protein, 5 aa, Homo sapiens
SSLVL

SEQ ID NO: 21962 - protein, 5 aa, Homo sapiens
RKSHL

SEQ ID NO: 21963 - protein, 5 aa, Homo sapiens
DVKKN

SEQ ID NO: 21964 - protein, 5 aa, Homo sapiens
HCAWP

SEQ ID NO: 21965 - protein, 5 aa, Homo sapiens
EDILF

SEQ ID NO: 21966 - protein, 5 aa, Homo sapiens
NTFWI

SEQ ID NO: 21967 - protein, 5 aa, Homo sapiens
LNAEV

SEQ ID NO: 21968 - protein, 5 aa, Homo sapiens
EPRRP

SEQ ID NO: 21969 - protein, 5 aa, Homo sapiens
AGHCT

SEQ ID NO: 21970 - protein, 5 aa, Homo sapiens
PYKCK

SEQ ID NO: 21971 - protein, 5 aa, Homo sapiens
SQTFL

SEQ ID NO: 21972 - protein, 5 aa, Homo sapiens
LTVHK

SEQ ID NO: 21973 - protein, 5 aa, Homo sapiens
KITLI

SEQ ID NO: 21974 - protein, 5 aa, Homo sapiens
KNHTN

SEQ ID NO: 21975 - protein, 5 aa, Homo sapiens
TRIPA

SEQ ID NO: 21976 - protein, 5 aa, Homo sapiens
TGENP

SEQ ID NO: 21977 - protein, 5 aa, Homo sapiens
TKHNS

SEQ ID NO: 21978 - protein, 5 aa, Homo sapiens
ETIQM

SEQ ID NO: 21979 - protein, 5 aa, Homo sapiens
ITLQM

SEQ ID NO: 21980 - protein, 5 aa, Homo sapiens
KWPEE

SEQ ID NO: 21981 - protein, 5 aa, Homo sapiens
KICIP

SEQ ID NO: 21982 - protein, 5 aa, Homo sapiens
MNEMK

SEQ ID NO: 21983 - protein, 5 aa, Homo sapiens
GVTVR

SEQ ID NO: 21984 - protein, 5 aa, Homo sapiens
FRRRR

SEQ ID NO: 21985 - protein, 5 aa, Homo sapiens
SNLTT

SEQ ID NO: 21986 - protein, 5 aa, Homo sapiens
DQPLQ

SEQ ID NO: 21987 - protein, 5 aa, Homo sapiens
CVAAL

SEQ ID NO: 21988 - protein, 5 aa, Homo sapiens
GQAGL

SEQ ID NO: 21989 - protein, 5 aa, Homo sapiens
PSFFF

SEQ ID NO: 21990 - protein, 5 aa, Homo sapiens
ATAAH

SEQ ID NO: 21991 - protein, 5 aa, Homo sapiens
RRSLA

SEQ ID NO: 21992 - protein, 5 aa, Homo sapiens
ATMPG

SEQ ID NO: 21993 - protein, 5 aa, Homo sapiens
SYKFN

SEQ ID NO: 21994 - protein, 5 aa, Homo sapiens
LSGFD

SEQ ID NO: 21995 - protein, 5 aa, Homo sapiens
HNNNC

SEQ ID NO: 21996 - protein, 5 aa, Homo sapiens
VIVTP

SEQ ID NO: 21997 - protein, 5 aa, Homo sapiens
IPALW

SEQ ID NO: 21998 - protein, 5 aa, Homo sapiens
YEKAQ

SEQ ID NO: 21999 - protein, 5 aa, Homo sapiens
AESAE

SEQ ID NO: 22000 - protein, 5 aa, Homo sapiens
NFCIF

SEQ ID NO: 22001 - protein, 5 aa, Homo sapiens
VSHCA

SEQ ID NO: 22002 - protein, 5 aa, Homo sapiens
SPSLL

SEQ ID NO: 22003 - protein, 5 aa, Homo sapiens
KELIS

SEQ ID NO: 22004 - protein, 5 aa, Homo sapiens
PRVMG

SEQ ID NO: 22005 - protein, 5 aa, Homo sapiens
ERAGA

SEQ ID NO: 22006 - protein, 5 aa, Homo sapiens
PTTEQ

SEQ ID NO: 22007 - protein, 5 aa, Homo sapiens
KKHDV

SEQ ID NO: 22008 - protein, 5 aa, Homo sapiens
YFLMV

SEQ ID NO: 22009 - protein, 5 aa, Homo sapiens
CPGWS

SEQ ID NO: 22010 - protein, 5 aa, Homo sapiens
RGVLA

SEQ ID NO: 22011 - protein, 5 aa, Homo sapiens
GGRWK

SEQ ID NO: 22012 - protein, 5 aa, Homo sapiens
SLIIH

SEQ ID NO: 22013 - protein, 5 aa, Homo sapiens
KSEER

SEQ ID NO: 22014 - protein, 5 aa, Homo sapiens
GTFNI

SEQ ID NO: 22015 - protein, 5 aa, Homo sapiens
FFGFF

SEQ ID NO: 22016 - protein, 5 aa, Homo sapiens
PPHPA

SEQ ID NO: 22017 - protein, 5 aa, Homo sapiens
GQKHV

SEQ ID NO: 22018 - protein, 5 aa, Homo sapiens
SNSSC

SEQ ID NO: 22019 - protein, 5 aa, Homo sapiens
CCKWI

SEQ ID NO: 22020 - protein, 5 aa, Homo sapiens
KMPRD

SEQ ID NO: 22021 - protein, 5 aa, Homo sapiens
TAWKL

SEQ ID NO: 22022 - protein, 5 aa, Homo sapiens
LVAED

SEQ ID NO: 22023 - protein, 5 aa, Homo sapiens
KSKRS

SEQ ID NO: 22024 - protein, 5 aa, Homo sapiens
NGDTT

SEQ ID NO: 22025 - protein, 5 aa, Homo sapiens
PKASG

SEQ ID NO: 22026 - protein, 5 aa, Homo sapiens
SDLSQ

SEQ ID NO: 22027 - protein, 5 aa, Homo sapiens
QSAGI

SEQ ID NO: 22028 - protein, 5 aa, Homo sapiens
GPEGP

SEQ ID NO: 22029 - protein, 5 aa, Homo sapiens
HTHRI

SEQ ID NO: 22030 - protein, 5 aa, Homo sapiens
ARGTQ

SEQ ID NO: 22031 - protein, 5 aa, Homo sapiens
HCTRP

SEQ ID NO: 22032 - protein, 5 aa, Homo sapiens
ARSSL

SEQ ID NO: 22033 - protein, 5 aa, Homo sapiens
ALERS

SEQ ID NO: 22034 - protein, 5 aa, Homo sapiens
RPVPS

SEQ ID NO: 22035 - protein, 5 aa, Homo sapiens
VFIYP

SEQ ID NO: 22036 - protein, 5 aa, Homo sapiens
TGRKP

SEQ ID NO: 22037 - protein, 5 aa, Homo sapiens
SPCLF

SEQ ID NO: 22038 - protein, 5 aa, Homo sapiens
TLSSG

SEQ ID NO: 22039 - protein, 5 aa, Homo sapiens
VSTHS

SEQ ID NO: 22040 - protein, 5 aa, Homo sapiens
RTQPE

SEQ ID NO: 22041 - protein, 5 aa, Homo sapiens
HRAND

SEQ ID NO: 22042 - protein, 5 aa, Homo sapiens
TCVMN

SEQ ID NO: 22043 - protein, 5 aa, Homo sapiens
VSYYS

SEQ ID NO: 22044 - protein, 5 aa, Homo sapiens
ALGSL

SEQ ID NO: 22045 - protein, 5 aa, Homo sapiens
AAFTR

SEQ ID NO: 22046 - protein, 5 aa, Homo sapiens
GTSSH

SEQ ID NO: 22047 - protein, 5 aa, Homo sapiens
TRIHP

SEQ ID NO: 22048 - protein, 5 aa, Homo sapiens
PSVKN

SEQ ID NO: 22049 - protein, 5 aa, Homo sapiens
EQCRW

SEQ ID NO: 22050 - protein, 5 aa, Homo sapiens
REPLH

SEQ ID NO: 22051 - protein, 5 aa, Homo sapiens
LFMSV

SEQ ID NO: 22052 - protein, 5 aa, Homo sapiens
SPGPS

SEQ ID NO: 22053 - protein, 5 aa, Homo sapiens
GTPSA

SEQ ID NO: 22054 - protein, 5 aa, Homo sapiens
LKIQK

SEQ ID NO: 22055 - protein, 5 aa, Homo sapiens
IVSSA

SEQ ID NO: 22056 - protein, 5 aa, Homo sapiens
FFRKI

SEQ ID NO: 22057 - protein, 5 aa, Homo sapiens
ARFFV

SEQ ID NO: 22058 - protein, 5 aa, Homo sapiens
RRQGE

SEQ ID NO: 22059 - protein, 5 aa, Homo sapiens
EKRAE

SEQ ID NO: 22060 - protein, 5 aa, Homo sapiens
WARPL

SEQ ID NO: 22061 - protein, 5 aa, Homo sapiens
TVVLM

SEQ ID NO: 22062 - protein, 5 aa, Homo sapiens
AETSN

SEQ ID NO: 22063 - protein, 5 aa, Homo sapiens
LVEGI

SEQ ID NO: 22064 - protein, 5 aa, Homo sapiens
KIDEF

SEQ ID NO: 22065 - protein, 5 aa, Homo sapiens
SHYAA

SEQ ID NO: 22066 - protein, 5 aa, Homo sapiens
KDLQA

SEQ ID NO: 22067 - protein, 5 aa, Homo sapiens
SVDLI

SEQ ID NO: 22068 - protein, 5 aa, Homo sapiens
FVSNR

SEQ ID NO: 22069 - protein, 5 aa, Homo sapiens
GYRRY

SEQ ID NO: 22070 - protein, 5 aa, Homo sapiens
PCLCC

SEQ ID NO: 22071 - protein, 5 aa, Homo sapiens
CQLDL

SEQ ID NO: 22072 - protein, 5 aa, Homo sapiens
RGGSQ

SEQ ID NO: 22073 - protein, 5 aa, Homo sapiens
ITKGD

SEQ ID NO: 22074 - protein, 5 aa, Homo sapiens
IEEPK

SEQ ID NO: 22075 - protein, 5 aa, Homo sapiens
LPSKG

SEQ ID NO: 22076 - protein, 5 aa, Homo sapiens
RNIEV

SEQ ID NO: 22077 - protein, 5 aa, Homo sapiens
FFPFV

SEQ ID NO: 22078 - protein, 5 aa, Homo sapiens
QSWFL

SEQ ID NO: 22079 - protein, 5 aa, Homo sapiens
PTDKH

SEQ ID NO: 22080 - protein, 5 aa, Homo sapiens
GPLCQ

SEQ ID NO: 22081 - protein, 5 aa, Homo sapiens
LGLQA

SEQ ID NO: 22082 - protein, 5 aa, Homo sapiens
SKKAH

SEQ ID NO: 22083 - protein, 5 aa, Homo sapiens
ETGML

SEQ ID NO: 22084 - protein, 5 aa, Homo sapiens
SSGCC

SEQ ID NO: 22085 - protein, 5 aa, Homo sapiens
TSPFP

SEQ ID NO: 22086 - protein, 5 aa, Homo sapiens
AASLD

SEQ ID NO: 22087 - protein, 5 aa, Homo sapiens
LSVQV

SEQ ID NO: 22088 - protein, 5 aa, Homo sapiens
LKGFQ

SEQ ID NO: 22089 - protein, 5 aa, Homo sapiens
KPRLY

SEQ ID NO: 22090 - protein, 5 aa, Homo sapiens
WHFGQ

SEQ ID NO: 22091 - protein, 5 aa, Homo sapiens
GTFNF

SEQ ID NO: 22092 - protein, 5 aa, Homo sapiens
AGKLG

SEQ ID NO: 22093 - protein, 5 aa, Homo sapiens
SLDGT

SEQ ID NO: 22094 - protein, 5 aa, Homo sapiens
VNSAI

SEQ ID NO: 22095 - protein, 5 aa, Homo sapiens
QKKTC

SEQ ID NO: 22096 - protein, 5 aa, Homo sapiens
LKLQF

SEQ ID NO: 22097 - protein, 5 aa, Homo sapiens
KGKEP

SEQ ID NO: 22098 - protein, 5 aa, Homo sapiens
DLLTS

SEQ ID NO: 22099 - protein, 5 aa, Homo sapiens
KVLER

SEQ ID NO: 22100 - protein, 5 aa, Homo sapiens
LSSRA

SEQ ID NO: 22101 - protein, 5 aa, Homo sapiens
RNGQM

SEQ ID NO: 22102 - protein, 5 aa, Homo sapiens
KQEKI

SEQ ID NO: 22103 - protein, 5 aa, Homo sapiens
KVSQL

SEQ ID NO: 22104 - protein, 5 aa, Homo sapiens
GDGVA

SEQ ID NO: 22105 - protein, 5 aa, Homo sapiens
KKAHS

SEQ ID NO: 22106 - protein, 5 aa, Homo sapiens
IMNML

SEQ ID NO: 22107 - protein, 5 aa, Homo sapiens
TETEC

SEQ ID NO: 22108 - protein, 5 aa, Homo sapiens
EIEEK

SEQ ID NO: 22109 - protein, 5 aa, Homo sapiens
FLYRI

SEQ ID NO: 22110 - protein, 5 aa, Homo sapiens
FRACQ

SEQ ID NO: 22111 - protein, 5 aa, Homo sapiens
ALQSK

SEQ ID NO: 22112 - protein, 5 aa, Homo sapiens
KTDKN

SEQ ID NO: 22113 - protein, 5 aa, Homo sapiens
FLTLQ

SEQ ID NO: 22114 - protein, 5 aa, Homo sapiens
PKVLG

SEQ ID NO: 22115 - protein, 5 aa, Homo sapiens
CYDIC

SEQ ID NO: 22116 - protein, 5 aa, Homo sapiens
SRQRI

SEQ ID NO: 22117 - protein, 5 aa, Homo sapiens
VWHLG

SEQ ID NO: 22118 - protein, 5 aa, Homo sapiens
GVQWR

SEQ ID NO: 22119 - protein, 5 aa, Homo sapiens
LCVPS

SEQ ID NO: 22120 - protein, 5 aa, Homo sapiens
HSDKS

SEQ ID NO: 22121 - protein, 5 aa, Homo sapiens
LRLIG

SEQ ID NO: 22122 - protein, 5 aa, Homo sapiens
RIHPV

SEQ ID NO: 22123 - protein, 5 aa, Homo sapiens
VLFMF

SEQ ID NO: 22124 - protein, 5 aa, Homo sapiens
PDFCP

SEQ ID NO: 22125 - protein, 5 aa, Homo sapiens
GMMAW

SEQ ID NO: 22126 - protein, 5 aa, Homo sapiens
EKLST

SEQ ID NO: 22127 - protein, 5 aa, Homo sapiens
TVPFF

SEQ ID NO: 22128 - protein, 5 aa, Homo sapiens
IFLYF

SEQ ID NO: 22129 - protein, 5 aa, Homo sapiens
VWKFP

SEQ ID NO: 22130 - protein, 5 aa, Homo sapiens
PQIIK

SEQ ID NO: 22131 - protein, 5 aa, Homo sapiens
ACEKT

SEQ ID NO: 22132 - protein, 5 aa, Homo sapiens
FWYIG

SEQ ID NO: 22133 - protein, 5 aa, Homo sapiens
MESTS

SEQ ID NO: 22134 - protein, 5 aa, Homo sapiens
KKSSC

SEQ ID NO: 22135 - protein, 5 aa, Homo sapiens
AGACA

SEQ ID NO: 22136 - protein, 5 aa, Homo sapiens
LVSAS

SEQ ID NO: 22137 - protein, 5 aa, Homo sapiens
PPGFK

SEQ ID NO: 22138 - protein, 5 aa, Homo sapiens
ASSRK

SEQ ID NO: 22139 - protein, 5 aa, Homo sapiens
FGAHY

SEQ ID NO: 22140 - protein, 5 aa, Homo sapiens
NDSNG

SEQ ID NO: 22141 - protein, 5 aa, Homo sapiens
KIPEE

SEQ ID NO: 22142 - protein, 5 aa, Homo sapiens
QEHAE

SEQ ID NO: 22143 - protein, 5 aa, Homo sapiens
MDKGF

SEQ ID NO: 22144 - protein, 5 aa, Homo sapiens
CRRKR

SEQ ID NO: 22145 - protein, 5 aa, Homo sapiens
SQSVR

SEQ ID NO: 22146 - protein, 5 aa, Homo sapiens
PLTRI

SEQ ID NO: 22147 - protein, 5 aa, Homo sapiens
LQTLT

SEQ ID NO: 22148 - protein, 5 aa, Homo sapiens
PAPGD

SEQ ID NO: 22149 - protein, 5 aa, Homo sapiens
RKGDH

SEQ ID NO: 22150 - protein, 5 aa, Homo sapiens
KVLGL

SEQ ID NO: 22151 - protein, 5 aa, Homo sapiens
PAPGC

SEQ ID NO: 22152 - protein, 5 aa, Homo sapiens
REIFF

SEQ ID NO: 22153 - protein, 5 aa, Homo sapiens
DERLQ

SEQ ID NO: 22154 - protein, 5 aa, Homo sapiens
PTAMA

SEQ ID NO: 22155 - protein, 5 aa, Homo sapiens
VQNFS

SEQ ID NO: 22156 - protein, 5 aa, Homo sapiens
QRAKS

SEQ ID NO: 22157 - protein, 5 aa, Homo sapiens
SGIVQ

SEQ ID NO: 22158 - protein, 5 aa, Homo sapiens
PFLSS

SEQ ID NO: 22159 - protein, 5 aa, Homo sapiens
ALFGK

SEQ ID NO: 22160 - protein, 5 aa, Homo sapiens
RCESE

SEQ ID NO: 22161 - protein, 5 aa, Homo sapiens
DICYS

SEQ ID NO: 22162 - protein, 5 aa, Homo sapiens
RTRQA

SEQ ID NO: 22163 - protein, 5 aa, Homo sapiens
TPDLR

SEQ ID NO: 22164 - protein, 5 aa, Homo sapiens
LGLQV

SEQ ID NO: 22165 - protein, 5 aa, Homo sapiens
EPKQC

SEQ ID NO: 22166 - protein, 5 aa, Homo sapiens
PWLGC

SEQ ID NO: 22167 - protein, 5 aa, Homo sapiens
PDKAS

SEQ ID NO: 22168 - protein, 5 aa, Homo sapiens
LVSNS

SEQ ID NO: 22169 - protein, 5 aa, Homo sapiens
LVSNS

SEQ ID NO: 22170 - protein, 5 aa, Homo sapiens
PRYHY

SEQ ID NO: 22171 - protein, 5 aa, Homo sapiens
YFVDA

SEQ ID NO: 22172 - protein, 5 aa, Homo sapiens
EPALH

SEQ ID NO: 22173 - protein, 5 aa, Homo sapiens
QPLVV

SEQ ID NO: 22174 - protein, 5 aa, Homo sapiens
KTSEF

SEQ ID NO: 22175 - protein, 5 aa, Homo sapiens
LLELK

SEQ ID NO: 22176 - protein, 5 aa, Homo sapiens
FLKNQ

SEQ ID NO: 22177 - protein, 5 aa, Homo sapiens
LQRYR

SEQ ID NO: 22178 - protein, 5 aa, Homo sapiens
APDAL

SEQ ID NO: 22179 - protein, 5 aa, Homo sapiens
RLFEC

SEQ ID NO: 22180 - protein, 5 aa, Homo sapiens
ERPDA

SEQ ID NO: 22181 - protein, 5 aa, Homo sapiens
KEHLS

SEQ ID NO: 22182 - protein, 5 aa, Homo sapiens
PSTAQ

SEQ ID NO: 22183 - protein, 5 aa, Homo sapiens
TLEHH

SEQ ID NO: 22184 - protein, 5 aa, Homo sapiens
ANGQA

SEQ ID NO: 22185 - protein, 5 aa, Homo sapiens
GEAVA

SEQ ID NO: 22186 - protein, 5 aa, Homo sapiens
FQRKK

SEQ ID NO: 22187 - protein, 5 aa, Homo sapiens
KRQSL

SEQ ID NO: 22188 - protein, 5 aa, Homo sapiens
HDAII

SEQ ID NO: 22189 - protein, 5 aa, Homo sapiens
NENSQ

SEQ ID NO: 22190 - protein, 5 aa, Homo sapiens
GVNLL

SEQ ID NO: 22191 - protein, 5 aa, Homo sapiens
EGSEV

SEQ ID NO: 22192 - protein, 5 aa, Homo sapiens
ERRRL

SEQ ID NO: 22193 - protein, 5 aa, Homo sapiens
QQQAQ

SEQ ID NO: 22194 - protein, 5 aa, Homo sapiens
VALAN

SEQ ID NO: 22195 - protein, 5 aa, Homo sapiens
SEPHS

SEQ ID NO: 22196 - protein, 5 aa, Homo sapiens
KQQGQ

SEQ ID NO: 22197 - protein, 5 aa, Homo sapiens
ITFRK

SEQ ID NO: 22198 - protein, 5 aa, Homo sapiens
ERDQK

SEQ ID NO: 22199 - protein, 5 aa, Homo sapiens
IESLQ

SEQ ID NO: 22200 - protein, 5 aa, Homo sapiens
EKKEK

SEQ ID NO: 22201 - protein, 5 aa, Homo sapiens
DQGVH

SEQ ID NO: 22202 - protein, 5 aa, Homo sapiens
SLPSS

SEQ ID NO: 22203 - protein, 5 aa, Homo sapiens
CHPGH

SEQ ID NO: 22204 - protein, 5 aa, Homo sapiens
GERKR

SEQ ID NO: 22205 - protein, 5 aa, Homo sapiens
DKAGL

SEQ ID NO: 22206 - protein, 5 aa, Homo sapiens
FCSLK

SEQ ID NO: 22207 - protein, 5 aa, Homo sapiens
IRRNL

SEQ ID NO: 22208 - protein, 5 aa, Homo sapiens
LELGL

SEQ ID NO: 22209 - protein, 5 aa, Homo sapiens
VRKVL

SEQ ID NO: 22210 - protein, 5 aa, Homo sapiens
GWSAV

SEQ ID NO: 22211 - protein, 5 aa, Homo sapiens
EDVEC

SEQ ID NO: 22212 - protein, 5 aa, Homo sapiens
SSGGU

SEQ ID NO: 22213 - protein, 5 aa, Homo sapiens
SVYMI

SEQ ID NO: 22214 - protein, 5 aa, Homo sapiens
PLDFD

SEQ ID NO: 22215 - protein, 5 aa, Homo sapiens
SPGWP

SEQ ID NO: 22216 - protein, 5 aa, Homo sapiens
YGNGR

SEQ ID NO: 22217 - protein, 5 aa, Homo sapiens
VYLDS

SEQ ID NO: 22218 - protein, 5 aa, Homo sapiens
RDQSK

SEQ ID NO: 22219 - protein, 5 aa, Homo sapiens
TEGPV

SEQ ID NO: 22220 - protein, 5 aa, Homo sapiens
TRNKL

SEQ ID NO: 22221 - protein, 5 aa, Homo sapiens
GEKKT

SEQ ID NO: 22222 - protein, 5 aa, Homo sapiens
CWVMW

SEQ ID NO: 22223 - protein, 5 aa, Homo sapiens
SQGAV

SEQ ID NO: 22224 - protein, 5 aa, Homo sapiens
FELQT

SEQ ID NO: 22225 - protein, 5 aa, Homo sapiens
LRRRR

SEQ ID NO: 22226 - protein, 5 aa, Homo sapiens
LEVIP

SEQ ID NO: 22227 - protein, 5 aa, Homo sapiens
SAVIW

SEQ ID NO: 22228 - protein, 5 aa, Homo sapiens
RCPLP

SEQ ID NO: 22229 - protein, 5 aa, Homo sapiens
RKPLS

SEQ ID NO: 22230 - protein, 5 aa, Homo sapiens
AEKAP

SEQ ID NO: 22231 - protein, 5 aa, Homo sapiens
RPFVF

SEQ ID NO: 22232 - protein, 5 aa, Homo sapiens
HPSIQ

SEQ ID NO: 22233 - protein, 5 aa, Homo sapiens
QLSNP

SEQ ID NO: 22234 - protein, 5 aa, Homo sapiens
FTTLH

SEQ ID NO: 22235 - protein, 5 aa, Homo sapiens
KDQRQ

SEQ ID NO: 22236 - protein, 5 aa, Homo sapiens
LRPFF

SEQ ID NO: 22237 - protein, 5 aa, Homo sapiens
DCGLF

SEQ ID NO: 22238 - protein, 5 aa, Homo sapiens
EAAGY

SEQ ID NO: 22239 - protein, 5 aa, Homo sapiens
LFVLE

SEQ ID NO: 22240 - protein, 5 aa, Homo sapiens
TQSFL

SEQ ID NO: 22241 - protein, 5 aa, Homo sapiens
NRDPG

SEQ ID NO: 22242 - protein, 5 aa, Homo sapiens
GDLSL

SEQ ID NO: 22243 - protein, 5 aa, Homo sapiens
GQAGL

SEQ ID NO: 22244 - protein, 5 aa, Homo sapiens
KKSYS

SEQ ID NO: 22245 - protein, 5 aa, Homo sapiens
PCVSS

SEQ ID NO: 22246 - protein, 5 aa, Homo sapiens
VTVTG

SEQ ID NO: 22247 - protein, 5 aa, Homo sapiens
LPPAL

SEQ ID NO: 22248 - protein, 5 aa, Homo sapiens
HLQLR

SEQ ID NO: 22249 - protein, 5 aa, Homo sapiens
LQFVP

SEQ ID NO: 22250 - protein, 5 aa, Homo sapiens
HMGQM

SEQ ID NO: 22251 - protein, 5 aa, Homo sapiens
VFNVK

SEQ ID NO: 22252 - protein, 5 aa, Homo sapiens
LATKL

SEQ ID NO: 22253 - protein, 5 aa, Homo sapiens
SDPPA

SEQ ID NO: 22254 - protein, 5 aa, Homo sapiens
LGRDG

SEQ ID NO: 22255 - protein, 5 aa, Homo sapiens
KQRQF

SEQ ID NO: 22256 - protein, 5 aa, Homo sapiens
PSFFF

SEQ ID NO: 22257 - protein, 5 aa, Homo sapiens
PLNIH

SEQ ID NO: 22258 - protein, 5 aa, Homo sapiens
PGLHL

SEQ ID NO: 22259 - protein, 5 aa, Homo sapiens
SVLPH

SEQ ID NO: 22260 - protein, 5 aa, Homo sapiens
TPDLR

SEQ ID NO: 22261 - protein, 5 aa, Homo sapiens
ISACT

SEQ ID NO: 22262 - protein, 5 aa, Homo sapiens
LTVSE

SEQ ID NO: 22263 - protein, 5 aa, Homo sapiens
PGKGV

SEQ ID NO: 22264 - protein, 5 aa, Homo sapiens
AGRWL

SEQ ID NO: 22265 - protein, 5 aa, Homo sapiens
QDSVS

SEQ ID NO: 22266 - protein, 5 aa, Homo sapiens
FFVET

SEQ ID NO: 22267 - protein, 5 aa, Homo sapiens
NSQDC

SEQ ID NO: 22268 - protein, 5 aa, Homo sapiens
VSWVR

SEQ ID NO: 22269 - protein, 5 aa, Homo sapiens
ESPWY

SEQ ID NO: 22270 - protein, 5 aa, Homo sapiens
CPGWS

SEQ ID NO: 22271 - protein, 5 aa, Homo sapiens
IETLR

SEQ ID NO: 22272 - protein, 5 aa, Homo sapiens
NMKHF

SEQ ID NO: 22273 - protein, 5 aa, Homo sapiens
RAHLS

SEQ ID NO: 22274 - protein, 5 aa, Homo sapiens
IRRMN

SEQ ID NO: 22275 - protein, 5 aa, Homo sapiens
CAGQC

SEQ ID NO: 22276 - protein, 5 aa, Homo sapiens
TGMSH

SEQ ID NO: 22277 - protein, 5 aa, Homo sapiens
GCILK

SEQ ID NO: 22278 - protein, 5 aa, Homo sapiens
VLGDV

SEQ ID NO: 22279 - protein, 5 aa, Homo sapiens
YGKCD

SEQ ID NO: 22280 - protein, 5 aa, Homo sapiens
EEYFI

SEQ ID NO: 22281 - protein, 5 aa, Homo sapiens
MFSCL

SEQ ID NO: 22282 - protein, 5 aa, Homo sapiens
PGPCG

SEQ ID NO: 22283 - protein, 5 aa, Homo sapiens
PIPCS

SEQ ID NO: 22284 - protein, 5 aa, Homo sapiens
IPGCP

SEQ ID NO: 22285 - protein, 5 aa, Homo sapiens
EDPLL

SEQ ID NO: 22286 - protein, 5 aa, Homo sapiens
SGVDG

SEQ ID NO: 22287 - protein, 5 aa, Homo sapiens
DLCTK

SEQ ID NO: 22288 - protein, 5 aa, Homo sapiens
QPSCC

SEQ ID NO: 22289 - protein, 5 aa, Homo sapiens
CGSSC

SEQ ID NO: 22290 - protein, 5 aa, Homo sapiens
HSQAS

SEQ ID NO: 22291 - protein, 5 aa, Homo sapiens
RTSSC

SEQ ID NO: 22292 - protein, 5 aa, Homo sapiens
LAKLK

SEQ ID NO: 22293 - protein, 5 aa, Homo sapiens
SELGF

SEQ ID NO: 22294 - protein, 5 aa, Homo sapiens
RSSSK

SEQ ID NO: 22295 - protein, 5 aa, Homo sapiens
SHVPL

SEQ ID NO: 22296 - protein, 5 aa, Homo sapiens
KAATH

SEQ ID NO: 22297 - protein, 5 aa, Homo sapiens
ISACT

SEQ ID NO: 22298 - protein, 5 aa, Homo sapiens
DIHAQ

SEQ ID NO: 22299 - protein, 5 aa, Homo sapiens
LTVLS

SEQ ID NO: 22300 - protein, 5 aa, Homo sapiens
VHVYM

SEQ ID NO: 22301 - protein, 5 aa, Homo sapiens
QNNNL

SEQ ID NO: 22302 - protein, 5 aa, Homo sapiens
EPEGE

SEQ ID NO: 22303 - protein, 5 aa, Homo sapiens
SSDLR

SEQ ID NO: 22304 - protein, 5 aa, Homo sapiens
GGGCC

SEQ ID NO: 22305 - protein, 5 aa, Homo sapiens
CQCKI

SEQ ID NO: 22306 - protein, 5 aa, Homo sapiens
AHCFF

SEQ ID NO: 22307 - protein, 5 aa, Homo sapiens
FKNPQ

SEQ ID NO: 22308 - protein, 5 aa, Homo sapiens
SKLPP

SEQ ID NO: 22309 - protein, 5 aa, Homo sapiens
KAGVF

SEQ ID NO: 22310 - protein, 5 aa, Homo sapiens
LTVSE

SEQ ID NO: 22311 - protein, 5 aa, Homo sapiens
STRPS

SEQ ID NO: 22312 - protein, 5 aa, Homo sapiens
DWGTH

SEQ ID NO: 22313 - protein, 5 aa, Homo sapiens
RQSLS

SEQ ID NO: 22314 - protein, 5 aa, Homo sapiens
PLLNI

SEQ ID NO: 22315 - protein, 5 aa, Homo sapiens
AFLED

SEQ ID NO: 22316 - protein, 5 aa, Homo sapiens
NQAAS

SEQ ID NO: 22317 - protein, 5 aa, Homo sapiens
KQRLR

SEQ ID NO: 22318 - protein, 5 aa, Homo sapiens
ITHRM

SEQ ID NO: 22319 - protein, 5 aa, Homo sapiens
HFPLF

SEQ ID NO: 22320 - protein, 5 aa, Homo sapiens
EMIIS

SEQ ID NO: 22321 - protein, 5 aa, Homo sapiens
IILLS

SEQ ID NO: 22322 - protein, 5 aa, Homo sapiens
PTSNQ

SEQ ID NO: 22323 - protein, 5 aa, Homo sapiens
TPRCL

SEQ ID NO: 22324 - protein, 5 aa, Homo sapiens
KILKQ

SEQ ID NO: 22325 - protein, 5 aa, Homo sapiens
PWDWE

SEQ ID NO: 22326 - protein, 5 aa, Homo sapiens
AQFPG

SEQ ID NO: 22327 - protein, 5 aa, Homo sapiens
LGLQA

SEQ ID NO: 22328 - protein, 5 aa, Homo sapiens
ADHGQ

SEQ ID NO: 22329 - protein, 5 aa, Homo sapiens
HVYSH

SEQ ID NO: 22330 - protein, 5 aa, Homo sapiens
PRQLQ

SEQ ID NO: 22331 - protein, 5 aa, Homo sapiens
TGDAK

SEQ ID NO: 22332 - protein, 5 aa, Homo sapiens
KRTHT

SEQ ID NO: 22333 - protein, 5 aa, Homo sapiens
KRKPP

SEQ ID NO: 22334 - protein, 5 aa, Homo sapiens
HKERK

SEQ ID NO: 22335 - protein, 5 aa, Homo sapiens
LTVSE

SEQ ID NO: 22336 - protein, 5 aa, Homo sapiens
LTVSE

SEQ ID NO: 22337 - protein, 5 aa, Homo sapiens
SRGKV

SEQ ID NO: 22338 - protein, 5 aa, Homo sapiens
NPPSE

SEQ ID NO: 22339 - protein, 5 aa, Homo sapiens
SSLEV

SEQ ID NO: 22340 - protein, 5 aa, Homo sapiens
FFVET

SEQ ID NO: 22341 - protein, 5 aa, Homo sapiens
NHPGQ

SEQ ID NO: 22342 - protein, 5 aa, Homo sapiens
PKERS

SEQ ID NO: 22343 - protein, 5 aa, Homo sapiens
HCARP

SEQ ID NO: 22344 - protein, 5 aa, Homo sapiens
RASIN

SEQ ID NO: 22345 - protein, 5 aa, Homo sapiens
SKKKK

SEQ ID NO: 22346 - protein, 5 aa, Homo sapiens
ASFNA

SEQ ID NO: 22347 - protein, 5 aa, Homo sapiens
AAFWG

SEQ ID NO: 22348 - protein, 5 aa, Homo sapiens
SLGLG

SEQ ID NO: 22349 - protein, 5 aa, Homo sapiens
TEARV

SEQ ID NO: 22350 - protein, 5 aa, Homo sapiens
RGPGK

SEQ ID NO: 22351 - protein, 5 aa, Homo sapiens
VQHLE

SEQ ID NO: 22352 - protein, 5 aa, Homo sapiens
SPKEK

SEQ ID NO: 22353 - protein, 5 aa, Homo sapiens
SPGCL

SEQ ID NO: 22354 - protein, 5 aa, Homo sapiens
SLGLG

SEQ ID NO: 22355 - protein, 5 aa, Homo sapiens
ISLAR

SEQ ID NO: 22356 - protein, 5 aa, Homo sapiens
DLLEI

SEQ ID NO: 22357 - protein, 5 aa, Homo sapiens
NTERS

SEQ ID NO: 22358 - protein, 5 aa, Homo sapiens
GKAST

SEQ ID NO: 22359 - protein, 5 aa, Homo sapiens
CFTNK

SEQ ID NO: 22360 - protein, 5 aa, Homo sapiens
LKCSG

SEQ ID NO: 22361 - protein, 5 aa, Homo sapiens
DLQHW

SEQ ID NO: 22362 - protein, 5 aa, Homo sapiens
PYKCK

SEQ ID NO: 22363 - protein, 5 aa, Homo sapiens
EDENQ

SEQ ID NO: 22364 - protein, 5 aa, Homo sapiens
FLKPA

SEQ ID NO: 22365 - protein, 5 aa, Homo sapiens
KLHQK

SEQ ID NO: 22366 - protein, 5 aa, Homo sapiens
ANCYM

SEQ ID NO: 22367 - protein, 5 aa, Homo sapiens
AAECG

SEQ ID NO: 22368 - protein, 5 aa, Homo sapiens
VGESW

SEQ ID NO: 22369 - protein, 5 aa, Homo sapiens
RPSPP

SEQ ID NO: 22370 - protein, 5 aa, Homo sapiens
SEPWV

SEQ ID NO: 22371 - protein, 5 aa, Homo sapiens
LTVVE

SEQ ID NO: 22372 - protein, 5 aa, Homo sapiens
SHHTW

SEQ ID NO: 22373 - protein, 5 aa, Homo sapiens
LIKHK

SEQ ID NO: 22374 - protein, 5 aa, Homo sapiens
NQTME

SEQ ID NO: 22375 - protein, 5 aa, Homo sapiens
KECTL

SEQ ID NO: 22376 - protein, 5 aa, Homo sapiens
FGLSD

SEQ ID NO: 22377 - protein, 5 aa, Homo sapiens
LGPGS

SEQ ID NO: 22378 - protein, 5 aa, Homo sapiens
ILTGL

SEQ ID NO: 22379 - protein, 5 aa, Homo sapiens
GEIVE

SEQ ID NO: 22380 - protein, 5 aa, Homo sapiens
IFCHC

SEQ ID NO: 22381 - protein, 5 aa, Homo sapiens
ERGSP

SEQ ID NO: 22382 - protein, 5 aa, Homo sapiens
LFMDE

SEQ ID NO: 22383 - protein, 5 aa, Homo sapiens
ILTGL

SEQ ID NO: 22384 - protein, 5 aa, Homo sapiens
ALPKQ

SEQ ID NO: 22385 - protein, 5 aa, Homo sapiens
DKAFN

SEQ ID NO: 22386 - protein, 5 aa, Homo sapiens
AQRDA

SEQ ID NO: 22387 - protein, 5 aa, Homo sapiens
MTMWG

SEQ ID NO: 22388 - protein, 5 aa, Homo sapiens
FIEGH

SEQ ID NO: 22389 - protein, 5 aa, Homo sapiens
LDIEI

SEQ ID NO: 22390 - protein, 5 aa, Homo sapiens
ESTKM

SEQ ID NO: 22391 - protein, 5 aa, Homo sapiens
HHTWP

SEQ ID NO: 22392 - protein, 5 aa, Homo sapiens
PQPPE

SEQ ID NO: 22393 - protein, 5 aa, Homo sapiens
VEMPL

SEQ ID NO: 22394 - protein, 5 aa, Homo sapiens
WPSRN

SEQ ID NO: 22395 - protein, 5 aa, Homo sapiens
LIQKR

SEQ ID NO: 22396 - protein, 5 aa, Homo sapiens
LTAIS

SEQ ID NO: 22397 - protein, 5 aa, Homo sapiens
MNARL

SEQ ID NO: 22398 - protein, 5 aa, Homo sapiens
DRFLQ

SEQ ID NO: 22399 - protein, 5 aa, Homo sapiens
QNSRP

SEQ ID NO: 22400 - protein, 5 aa, Homo sapiens
IRVAL

SEQ ID NO: 22401 - protein, 5 aa, Homo sapiens
LGHPI

SEQ ID NO: 22402 - protein, 5 aa, Homo sapiens
GCFNI

SEQ ID NO: 22403 - protein, 5 aa, Homo sapiens
PELMS

SEQ ID NO: 22404 - protein, 5 aa, Homo sapiens
GGALG

SEQ ID NO: 22405 - protein, 5 aa, Homo sapiens
QFPDL

SEQ ID NO: 22406 - protein, 5 aa, Homo sapiens
MSSYV

SEQ ID NO: 22407 - protein, 5 aa, Homo sapiens
GASQP

SEQ ID NO: 22408 - protein, 5 aa, Homo sapiens
PPGSG

SEQ ID NO: 22409 - protein, 5 aa, Homo sapiens
LGPGI

SEQ ID NO: 22410 - protein, 5 aa, Homo sapiens
GFADY

SEQ ID NO: 22411 - protein, 5 aa, Homo sapiens
PGLES

SEQ ID NO: 22412 - protein, 5 aa, Homo sapiens
QQVNK

SEQ ID NO: 22413 - protein, 5 aa, Homo sapiens
MGTCL

SEQ ID NO: 22414 - protein, 5 aa, Homo sapiens
IFQDC

SEQ ID NO: 22415 - protein, 5 aa, Homo sapiens
APFCL

SEQ ID NO: 22416 - protein, 5 aa, Homo sapiens
VDLFH

SEQ ID NO: 22417 - protein, 5 aa, Homo sapiens
FFTKT

SEQ ID NO: 22418 - protein, 5 aa, Homo sapiens
QYWRK

SEQ ID NO: 22419 - protein, 5 aa, Homo sapiens
KINPI

SEQ ID NO: 22420 - protein, 5 aa, Homo sapiens
SDSHF

SEQ ID NO: 22421 - protein, 5 aa, Homo sapiens
HHAQP

SEQ ID NO: 22422 - protein, 5 aa, Homo sapiens
PPGFK

SEQ ID NO: 22423 - protein, 5 aa, Homo sapiens
PQPGV

SEQ ID NO: 22424 - protein, 5 aa, Homo sapiens
AVLIG

SEQ ID NO: 22425 - protein, 5 aa, Homo sapiens
LVLST

SEQ ID NO: 22426 - protein, 5 aa, Homo sapiens
RLGAF

SEQ ID NO: 22427 - protein, 5 aa, Homo sapiens
LGTYY

SEQ ID NO: 22428 - protein, 5 aa, Homo sapiens
ADTVL

SEQ ID NO: 22429 - protein, 5 aa, Homo sapiens
ITLKL

SEQ ID NO: 22430 - protein, 5 aa, Homo sapiens
LTLRS

SEQ ID NO: 22431 - protein, 5 aa, Homo sapiens
GQVPS

SEQ ID NO: 22432 - protein, 5 aa, Homo sapiens
TIEDD

SEQ ID NO: 22433 - protein, 5 aa, Homo sapiens
SEAEV

SEQ ID NO: 22434 - protein, 5 aa, Homo sapiens
IQGSH

SEQ ID NO: 22435 - protein, 5 aa, Homo sapiens
KHQMK

SEQ ID NO: 22436 - protein, 5 aa, Homo sapiens
CLVVR

SEQ ID NO: 22437 - protein, 5 aa, Homo sapiens
CEFIA

SEQ ID NO: 22438 - protein, 5 aa, Homo sapiens
EVFQE

SEQ ID NO: 22439 - protein, 5 aa, Homo sapiens
CEFMA

SEQ ID NO: 22440 - protein, 5 aa, Homo sapiens
NSLRP

SEQ ID NO: 22441 - protein, 5 aa, Homo sapiens
KVLGL

SEQ ID NO: 22442 - protein, 5 aa, Homo sapiens
NTCSG

SEQ ID NO: 22443 - protein, 5 aa, Homo sapiens
SMQYI

SEQ ID NO: 22444 - protein, 5 aa, Homo sapiens
CQALF

SEQ ID NO: 22445 - protein, 5 aa, Homo sapiens
STLGG

SEQ ID NO: 22446 - protein, 5 aa, Homo sapiens
IWSYS

SEQ ID NO: 22447 - protein, 5 aa, Homo sapiens
PVASS

SEQ ID NO: 22448 - protein, 5 aa, Homo sapiens
CVEVS

SEQ ID NO: 22449 - protein, 5 aa, Homo sapiens
QGLFR

SEQ ID NO: 22450 - protein, 5 aa, Homo sapiens
TTGAR

SEQ ID NO: 22451 - protein, 5 aa, Homo sapiens
TQGQT

SEQ ID NO: 22452 - protein, 5 aa, Homo sapiens
RTSEA

SEQ ID NO: 22453 - protein, 5 aa, Homo sapiens
ISALF

SEQ ID NO: 22454 - protein, 5 aa, Homo sapiens
ELKPL

SEQ ID NO: 22455 - protein, 5 aa, Homo sapiens
ISFLL

SEQ ID NO: 22456 - protein, 5 aa, Homo sapiens
LVRRL

SEQ ID NO: 22457 - protein, 5 aa, Homo sapiens
KQKCQ

SEQ ID NO: 22458 - protein, 5 aa, Homo sapiens
LHQWH

SEQ ID NO: 22459 - protein, 5 aa, Homo sapiens
LGLQA

SEQ ID NO: 22460 - protein, 5 aa, Homo sapiens
FELED

SEQ ID NO: 22461 - protein, 5 aa, Homo sapiens
FSNPV

SEQ ID NO: 22462 - protein, 5 aa, Homo sapiens
LEYLS

SEQ ID NO: 22463 - protein, 5 aa, Homo sapiens
ERLQP

SEQ ID NO: 22464 - protein, 5 aa, Homo sapiens
PCLCL

SEQ ID NO: 22465 - protein, 5 aa, Homo sapiens
LPATT

SEQ ID NO: 22466 - protein, 5 aa, Homo sapiens
IVVGS

SEQ ID NO: 22467 - protein, 5 aa, Homo sapiens
SSSFS

SEQ ID NO: 22468 - protein, 5 aa, Homo sapiens
WLRDT

SEQ ID NO: 22469 - protein, 5 aa, Homo sapiens
KATNE

SEQ ID NO: 22470 - protein, 5 aa, Homo sapiens
KGKIF

SEQ ID NO: 22471 - protein, 5 aa, Homo sapiens
LSSLE

SEQ ID NO: 22472 - protein, 5 aa, Homo sapiens
PRTGS

SEQ ID NO: 22473 - protein, 5 aa, Homo sapiens
NRLAA

SEQ ID NO: 22474 - protein, 5 aa, Homo sapiens
WAVRR

SEQ ID NO: 22475 - protein, 5 aa, Homo sapiens
NMAKP

SEQ ID NO: 22476 - protein, 5 aa, Homo sapiens
RKKVP

SEQ ID NO: 22477 - protein, 5 aa, Homo sapiens
SQASL

SEQ ID NO: 22478 - protein, 5 aa, Homo sapiens
KEITY

SEQ ID NO: 22479 - protein, 5 aa, Homo sapiens
IAISV

SEQ ID NO: 22480 - protein, 5 aa, Homo sapiens
LKENF

SEQ ID NO: 22481 - protein, 5 aa, Homo sapiens
LENIA

SEQ ID NO: 22482 - protein, 5 aa, Homo sapiens
WRALG

SEQ ID NO: 22483 - protein, 5 aa, Homo sapiens
WRALG

SEQ ID NO: 22484 - protein, 5 aa, Homo sapiens
HSRDG

SEQ ID NO: 22485 - protein, 5 aa, Homo sapiens
WRALG

SEQ ID NO: 22486 - protein, 5 aa, Homo sapiens
GSDSE

SEQ ID NO: 22487 - protein, 5 aa, Homo sapiens
HSRDG

SEQ ID NO: 22488 - protein, 5 aa, Homo sapiens
EKITS

SEQ ID NO: 22489 - protein, 5 aa, Homo sapiens
LLQLA

SEQ ID NO: 22490 - protein, 5 aa, Homo sapiens
RSVAR

SEQ ID NO: 22491 - protein, 5 aa, Homo sapiens
WAVRR

SEQ ID NO: 22492 - protein, 5 aa, Homo sapiens
TPGQE

SEQ ID NO: 22493 - protein, 5 aa, Homo sapiens
SSKDL

SEQ ID NO: 22494 - protein, 5 aa, Homo sapiens
SSSPH

SEQ ID NO: 22495 - protein, 5 aa, Homo sapiens
RVFRY

SEQ ID NO: 22496 - protein, 5 aa, Homo sapiens
VPVDQ

SEQ ID NO: 22497 - protein, 5 aa, Homo sapiens
LLSLL

SEQ ID NO: 22498 - protein, 5 aa, Homo sapiens
TFVLQ

SEQ ID NO: 22499 - protein, 5 aa, Homo sapiens
PQLPE

SEQ ID NO: 22500 - protein, 5 aa, Homo sapiens
SREGV

SEQ ID NO: 22501 - protein, 5 aa, Homo sapiens
KTKKK

SEQ ID NO: 22502 - protein, 5 aa, Homo sapiens
ASFQA

SEQ ID NO: 22503 - protein, 5 aa, Homo sapiens
AYYET

SEQ ID NO: 22504 - protein, 5 aa, Homo sapiens
LIHTA

SEQ ID NO: 22505 - protein, 5 aa, Homo sapiens
TLRAP

SEQ ID NO: 22506 - protein, 5 aa, Homo sapiens
RGIQV

SEQ ID NO: 22507 - protein, 5 aa, Homo sapiens
KAFST

SEQ ID NO: 22508 - protein, 5 aa, Homo sapiens
LHGSS

SEQ ID NO: 22509 - protein, 5 aa, Homo sapiens
ILQQN

SEQ ID NO: 22510 - protein, 5 aa, Homo sapiens
LMTSD

SEQ ID NO: 22511 - protein, 5 aa, Homo sapiens
KETPF

SEQ ID NO: 22512 - protein, 5 aa, Homo sapiens
GKYVD

SEQ ID NO: 22513 - protein, 5 aa, Homo sapiens
DFQRE

SEQ ID NO: 22514 - protein, 5 aa, Homo sapiens
VSFLL

SEQ ID NO: 22515 - protein, 5 aa, Homo sapiens
ARQHG

SEQ ID NO: 22516 - protein, 5 aa, Homo sapiens
KKIAS

SEQ ID NO: 22517 - protein, 5 aa, Homo sapiens
KGNQI

SEQ ID NO: 22518 - protein, 5 aa, Homo sapiens
SLTIH

SEQ ID NO: 22519 - protein, 5 aa, Homo sapiens
QVRSR

SEQ ID NO: 22520 - protein, 5 aa, Homo sapiens
TTEWS

SEQ ID NO: 22521 - protein, 5 aa, Homo sapiens
WDDTA

SEQ ID NO: 22522 - protein, 5 aa, Homo sapiens
REMEA

SEQ ID NO: 22523 - protein, 5 aa, Homo sapiens
DLQSV

SEQ ID NO: 22524 - protein, 5 aa, Homo sapiens
RQTTR

SEQ ID NO: 22525 - protein, 5 aa, Homo sapiens
WRPKI

SEQ ID NO: 22526 - protein, 5 aa, Homo sapiens
KERKK

SEQ ID NO: 22527 - protein, 5 aa, Homo sapiens
PMGTV

SEQ ID NO: 22528 - protein, 5 aa, Homo sapiens
IEKLL

SEQ ID NO: 22529 - protein, 5 aa, Homo sapiens
LSPRR

SEQ ID NO: 22530 - protein, 5 aa, Homo sapiens
LSSWD

SEQ ID NO: 22531 - protein, 5 aa, Homo sapiens
ARISL

SEQ ID NO: 22532 - protein, 5 aa, Homo sapiens
PSSWD

SEQ ID NO: 22533 - protein, 5 aa, Homo sapiens
RGSHL

SEQ ID NO: 22534 - protein, 5 aa, Homo sapiens
VRVPQ

SEQ ID NO: 22535 - protein, 5 aa, Homo sapiens
EIPAK

SEQ ID NO: 22536 - protein, 5 aa, Homo sapiens
QVIQF

SEQ ID NO: 22537 - protein, 5 aa, Homo sapiens
FFYFL

SEQ ID NO: 22538 - protein, 5 aa, Homo sapiens
LLRSL

SEQ ID NO: 22539 - protein, 5 aa, Homo sapiens
DMEEN

SEQ ID NO: 22540 - protein, 5 aa, Homo sapiens
LLSTF

SEQ ID NO: 22541 - protein, 5 aa, Homo sapiens
NDTAS

SEQ ID NO: 22542 - protein, 5 aa, Homo sapiens
PILLC

SEQ ID NO: 22543 - protein, 5 aa, Homo sapiens
STSDD

SEQ ID NO: 22544 - protein, 5 aa, Homo sapiens
RKYIL

SEQ ID NO: 22545 - protein, 5 aa, Homo sapiens
KKQEA

SEQ ID NO: 22546 - protein, 5 aa, Homo sapiens
WHKSW

SEQ ID NO: 22547 - protein, 5 aa, Homo sapiens
ERLHT

SEQ ID NO: 22548 - protein, 5 aa, Homo sapiens
KDSFK

SEQ ID NO: 22549 - protein, 5 aa, Homo sapiens
PTNFK

SEQ ID NO: 22550 - protein, 5 aa, Homo sapiens
SHHTP

SEQ ID NO: 22551 - protein, 5 aa, Homo sapiens
KLTLL

SEQ ID NO: 22552 - protein, 5 aa, Homo sapiens
QQKCS

SEQ ID NO: 22553 - protein, 5 aa, Homo sapiens
ASQAA

SEQ ID NO: 22554 - protein, 5 aa, Homo sapiens
SLSSE

SEQ ID NO: 22555 - protein, 5 aa, Homo sapiens
MTVSS

SEQ ID NO: 22556 - protein, 5 aa, Homo sapiens
KKRKK

SEQ ID NO: 22557 - protein, 5 aa, Homo sapiens
DSDSG

SEQ ID NO: 22558 - protein, 5 aa, Homo sapiens
ATNNS

SEQ ID NO: 22559 - protein, 5 aa, Homo sapiens
RKLVQ

SEQ ID NO: 22560 - protein, 5 aa, Homo sapiens
AFGGQ

SEQ ID NO: 22561 - protein, 5 aa, Homo sapiens
SRLLN

SEQ ID NO: 22562 - protein, 5 aa, Homo sapiens
TFTKL

SEQ ID NO: 22563 - protein, 5 aa, Homo sapiens
ARLEF

SEQ ID NO: 22564 - protein, 5 aa, Homo sapiens
TPDLK

SEQ ID NO: 22565 - protein, 5 aa, Homo sapiens
FWDKV

SEQ ID NO: 22566 - protein, 5 aa, Homo sapiens
LANFF

SEQ ID NO: 22567 - protein, 5 aa, Homo sapiens
MVSIS

SEQ ID NO: 22568 - protein, 5 aa, Homo sapiens
GKLGQ

SEQ ID NO: 22569 - protein, 5 aa, Homo sapiens
KERKK

SEQ ID NO: 22570 - protein, 5 aa, Homo sapiens
KKKIS

SEQ ID NO: 22571 - protein, 5 aa, Homo sapiens
ACQWS

SEQ ID NO: 22572 - protein, 5 aa, Homo sapiens
LVAQR

SEQ ID NO: 22573 - protein, 5 aa, Homo sapiens
KVLFT

SEQ ID NO: 22574 - protein, 5 aa, Homo sapiens
QSRVR

SEQ ID NO: 22575 - protein, 5 aa, Homo sapiens
LASAA

SEQ ID NO: 22576 - protein, 5 aa, Homo sapiens
DAGLV

SEQ ID NO: 22577 - protein, 5 aa, Homo sapiens
RSLHL

SEQ ID NO: 22578 - protein, 5 aa, Homo sapiens
LHCYH

SEQ ID NO: 22579 - protein, 5 aa, Homo sapiens
EWRGR

SEQ ID NO: 22580 - protein, 5 aa, Homo sapiens
VITLL

SEQ ID NO: 22581 - protein, 5 aa, Homo sapiens
TPRQS

SEQ ID NO: 22582 - protein, 5 aa, Homo sapiens
TCIQG

SEQ ID NO: 22583 - protein, 5 aa, Homo sapiens
AAFWA

SEQ ID NO: 22584 - protein, 5 aa, Homo sapiens
IKGKK

SEQ ID NO: 22585 - protein, 5 aa, Homo sapiens
GVSQC

SEQ ID NO: 22586 - protein, 5 aa, Homo sapiens
KEKKK

SEQ ID NO: 22587 - protein, 5 aa, Homo sapiens
MQQKR

SEQ ID NO: 22588 - protein, 5 aa, Homo sapiens
HGPQH

SEQ ID NO: 22589 - protein, 5 aa, Homo sapiens
SNDLY

SEQ ID NO: 22590 - protein, 5 aa, Homo sapiens
DLTQD

SEQ ID NO: 22591 - protein, 5 aa, Homo sapiens
RPSPI

SEQ ID NO: 22592 - protein, 5 aa, Homo sapiens
NCIHI

SEQ ID NO: 22593 - protein, 5 aa, Homo sapiens
GRMGM

SEQ ID NO: 22594 - protein, 5 aa, Homo sapiens
RVIAD

SEQ ID NO: 22595 - protein, 5 aa, Homo sapiens
CLSLV

SEQ ID NO: 22596 - protein, 5 aa, Homo sapiens
DMFSV

SEQ ID NO: 22597 - protein, 5 aa, Homo sapiens
LVIAT

SEQ ID NO: 22598 - protein, 5 aa, Homo sapiens
SPSIS

SEQ ID NO: 22599 - protein, 5 aa, Homo sapiens
HDEAC

SEQ ID NO: 22600 - protein, 5 aa, Homo sapiens
LGLQA

SEQ ID NO: 22601 - protein, 5 aa, Homo sapiens
PTDRH

SEQ ID NO: 22602 - protein, 5 aa, Homo sapiens
NTCGK

SEQ ID NO: 22603 - protein, 5 aa, Homo sapiens
TPGLK

SEQ ID NO: 22604 - protein, 5 aa, Homo sapiens
SPLAW

SEQ ID NO: 22605 - protein, 5 aa, Homo sapiens
LPTAA

SEQ ID NO: 22606 - protein, 5 aa, Homo sapiens
QRGSA

SEQ ID NO: 22607 - protein, 5 aa, Homo sapiens
FRTTW

SEQ ID NO: 22608 - protein, 5 aa, Homo sapiens
GPWPQ

SEQ ID NO: 22609 - protein, 5 aa, Homo sapiens
CGKAF

SEQ ID NO: 22610 - protein, 5 aa, Homo sapiens
GQCPS

SEQ ID NO: 22611 - protein, 5 aa, Homo sapiens
QKTNK

SEQ ID NO: 22612 - protein, 5 aa, Homo sapiens
QELNH

SEQ ID NO: 22613 - protein, 5 aa, Homo sapiens
KGRKP

SEQ ID NO: 22614 - protein, 5 aa, Homo sapiens
DSDSG

SEQ ID NO: 22615 - protein, 5 aa, Homo sapiens
LPVLE

SEQ ID NO: 22616 - protein, 5 aa, Homo sapiens
PPASP

SEQ ID NO: 22617 - protein, 5 aa, Homo sapiens
VIEMS

SEQ ID NO: 22618 - protein, 5 aa, Homo sapiens
FFFFG

SEQ ID NO: 22619 - protein, 5 aa, Homo sapiens
KPQYF

SEQ ID NO: 22620 - protein, 5 aa, Homo sapiens
EPRSH

SEQ ID NO: 22621 - protein, 5 aa, Homo sapiens
PSGVA

SEQ ID NO: 22622 - protein, 5 aa, Homo sapiens
QKKRP

SEQ ID NO: 22623 - protein, 5 aa, Homo sapiens
PEANT

SEQ ID NO: 22624 - protein, 5 aa, Homo sapiens
ECLPD

SEQ ID NO: 22625 - protein, 5 aa, Homo sapiens
YYHRL

SEQ ID NO: 22626 - protein, 5 aa, Homo sapiens
VCMCV

SEQ ID NO: 22627 - protein, 5 aa, Homo sapiens
PEASV

SEQ ID NO: 22628 - protein, 5 aa, Homo sapiens
EHWVW

SEQ ID NO: 22629 - protein, 5 aa, Homo sapiens
AQKAK

SEQ ID NO: 22630 - protein, 5 aa, Homo sapiens
AGFKL

SEQ ID NO: 22631 - protein, 5 aa, Homo sapiens
LYPTH

SEQ ID NO: 22632 - protein, 5 aa, Homo sapiens
FAIFG

SEQ ID NO: 22633 - protein, 5 aa, Homo sapiens
SEVRT

SEQ ID NO: 22634 - protein, 5 aa, Homo sapiens
RWRLQ

SEQ ID NO: 22635 - protein, 5 aa, Homo sapiens
SRRLQ

SEQ ID NO: 22636 - protein, 5 aa, Homo sapiens
ALHHD

SEQ ID NO: 22637 - protein, 5 aa, Homo sapiens
VLSSI

SEQ ID NO: 22638 - protein, 5 aa, Homo sapiens
RTPPL

SEQ ID NO: 22639 - protein, 5 aa, Homo sapiens
TGQFR

SEQ ID NO: 22640 - protein, 5 aa, Homo sapiens
HRARP

SEQ ID NO: 22641 - protein, 5 aa, Homo sapiens
LQQLK

SEQ ID NO: 22642 - protein, 5 aa, Homo sapiens
PSETS

SEQ ID NO: 22643 - protein, 5 aa, Homo sapiens
TDKFQ

SEQ ID NO: 22644 - protein, 5 aa, Homo sapiens
TDKFQ

SEQ ID NO: 22645 - protein, 5 aa, Homo sapiens
WLSPM

SEQ ID NO: 22646 - protein, 5 aa, Homo sapiens
QELLY

SEQ ID NO: 22647 - protein, 5 aa, Homo sapiens
FYKMG

SEQ ID NO: 22648 - protein, 5 aa, Homo sapiens
YSSVS

SEQ ID NO: 22649 - protein, 5 aa, Homo sapiens
RPLVS

SEQ ID NO: 22650 - protein, 5 aa, Homo sapiens
RLQDQ

SEQ ID NO: 22651 - protein, 5 aa, Homo sapiens
HCARP

SEQ ID NO: 22652 - protein, 5 aa, Homo sapiens
YVSSL

SEQ ID NO: 22653 - protein, 5 aa, Homo sapiens
PASAS

SEQ ID NO: 22654 - protein, 5 aa, Homo sapiens
GKAST

SEQ ID NO: 22655 - protein, 5 aa, Homo sapiens
LLESR

SEQ ID NO: 22656 - protein, 5 aa, Homo sapiens
RPAWA

SEQ ID NO: 22657 - protein, 5 aa, Homo sapiens
ALERP

SEQ ID NO: 22658 - protein, 5 aa, Homo sapiens
NESRS

SEQ ID NO: 22659 - protein, 5 aa, Homo sapiens
IQETP

SEQ ID NO: 22660 - protein, 5 aa, Homo sapiens
VITLL

SEQ ID NO: 22661 - protein, 5 aa, Homo sapiens
LEPRL

SEQ ID NO: 22662 - protein, 5 aa, Homo sapiens
HQTTQ

SEQ ID NO: 22663 - protein, 5 aa, Homo sapiens
LTLSD

SEQ ID NO: 22664 - protein, 5 aa, Homo sapiens
PASLE

SEQ ID NO: 22665 - protein, 5 aa, Homo sapiens
CQCKI

SEQ ID NO: 22666 - protein, 5 aa, Homo sapiens
LLWAP

SEQ ID NO: 22667 - protein, 5 aa, Homo sapiens
TQLLS

SEQ ID NO: 22668 - protein, 5 aa, Homo sapiens
PYKCE

SEQ ID NO: 22669 - protein, 5 aa, Homo sapiens
GEAVA

SEQ ID NO: 22670 - protein, 5 aa, Homo sapiens
QTEDS

SEQ ID NO: 22671 - protein, 5 aa, Homo sapiens
RSNRR

SEQ ID NO: 22672 - protein, 5 aa, Homo sapiens
LSTPS

SEQ ID NO: 22673 - protein, 5 aa, Homo sapiens
PPSVS

SEQ ID NO: 22674 - protein, 5 aa, Homo sapiens
RSCLK

SEQ ID NO: 22675 - protein, 5 aa, Homo sapiens
DFLSN

SEQ ID NO: 22676 - protein, 5 aa, Homo sapiens
DAAGL

SEQ ID NO: 22677 - protein, 5 aa, Homo sapiens
PQPPK

SEQ ID NO: 22678 - protein, 5 aa, Homo sapiens
LQLLG

SEQ ID NO: 22679 - protein, 5 aa, Homo sapiens
KLEKK

SEQ ID NO: 22680 - protein, 5 aa, Homo sapiens
RMAKM

SEQ ID NO: 22681 - protein, 5 aa, Homo sapiens
TSTEV

SEQ ID NO: 22682 - protein, 5 aa, Homo sapiens
TSTEV

SEQ ID NO: 22683 - protein, 5 aa, Homo sapiens
VCIRG

SEQ ID NO: 22684 - protein, 5 aa, Homo sapiens
HANTP

SEQ ID NO: 22685 - protein, 5 aa, Homo sapiens
ITGTQ

SEQ ID NO: 22686 - protein, 5 aa, Homo sapiens
APHSS

SEQ ID NO: 22687 - protein, 5 aa, Homo sapiens
TKISR

SEQ ID NO: 22688 - protein, 5 aa, Homo sapiens
KQLLA

SEQ ID NO: 22689 - protein, 5 aa, Homo sapiens
KHRDI

SEQ ID NO: 22690 - protein, 5 aa, Homo sapiens
FGWSR

SEQ ID NO: 22691 - protein, 5 aa, Homo sapiens
KKVEE

SEQ ID NO: 22692 - protein, 5 aa, Homo sapiens
ITEGY

SEQ ID NO: 22693 - protein, 5 aa, Homo sapiens
AEVCP

SEQ ID NO: 22694 - protein, 5 aa, Homo sapiens
ASGEK

SEQ ID NO: 22695 - protein, 5 aa, Homo sapiens
RDIQK

SEQ ID NO: 22696 - protein, 5 aa, Homo sapiens
KNCAG

SEQ ID NO: 22697 - protein, 5 aa, Homo sapiens
GHELS

SEQ ID NO: 22698 - protein, 5 aa, Homo sapiens
VQGNQ

SEQ ID NO: 22699 - protein, 5 aa, Homo sapiens
RNGMD

SEQ ID NO: 22700 - protein, 5 aa, Homo sapiens
YLLQP

SEQ ID NO: 22701 - protein, 5 aa, Homo sapiens
WEGPC

SEQ ID NO: 22702 - protein, 5 aa, Homo sapiens
AQKGS

SEQ ID NO: 22703 - protein, 5 aa, Homo sapiens
PTPSS

SEQ ID NO: 22704 - protein, 5 aa, Homo sapiens
GSRDS

SEQ ID NO: 22705 - protein, 5 aa, Homo sapiens
IDLQR

SEQ ID NO: 22706 - protein, 5 aa, Homo sapiens
APSAP

SEQ ID NO: 22707 - protein, 5 aa, Homo sapiens
PKKKI

SEQ ID NO: 22708 - protein, 5 aa, Homo sapiens
PQPPK

SEQ ID NO: 22709 - protein, 5 aa, Homo sapiens
HIAPS

SEQ ID NO: 22710 - protein, 5 aa, Homo sapiens
FFFLR

SEQ ID NO: 22711 - protein, 5 aa, Homo sapiens
ALDKV

SEQ ID NO: 22712 - protein, 5 aa, Homo sapiens
PVSDG

SEQ ID NO: 22713 - protein, 5 aa, Homo sapiens
QNAEP

SEQ ID NO: 22714 - protein, 5 aa, Homo sapiens
SHCTW

SEQ ID NO: 22715 - protein, 5 aa, Homo sapiens
GVNHR

SEQ ID NO: 22716 - protein, 5 aa, Homo sapiens
DSKPY

SEQ ID NO: 22717 - protein, 5 aa, Homo sapiens
HDLHM

SEQ ID NO: 22718 - protein, 5 aa, Homo sapiens
DQFAA

SEQ ID NO: 22719 - protein, 5 aa, Homo sapiens
WMQKC

SEQ ID NO: 22720 - protein, 5 aa, Homo sapiens
STKNT

SEQ ID NO: 22721 - protein, 5 aa, Homo sapiens
GLRTG

SEQ ID NO: 22722 - protein, 5 aa, Homo sapiens
NFCIF

SEQ ID NO: 22723 - protein, 5 aa, Homo sapiens
HTHNE

SEQ ID NO: 22724 - protein, 5 aa, Homo sapiens
CAIPF

SEQ ID NO: 22725 - protein, 5 aa, Homo sapiens
TASRL

SEQ ID NO: 22726 - protein, 5 aa, Homo sapiens
HCLDL

SEQ ID NO: 22727 - protein, 5 aa, Homo sapiens
RCLLC

SEQ ID NO: 22728 - protein, 5 aa, Homo sapiens
WPDWS

SEQ ID NO: 22729 - protein, 5 aa, Homo sapiens
CRSTC

SEQ ID NO: 22730 - protein, 5 aa, Homo sapiens
ENEGI

SEQ ID NO: 22731 - protein, 5 aa, Homo sapiens
QRLYY

SEQ ID NO: 22732 - protein, 5 aa, Homo sapiens
PPVNT

SEQ ID NO: 22733 - protein, 5 aa, Homo sapiens
LLPYP

SEQ ID NO: 22734 - protein, 5 aa, Homo sapiens
GQPNF

SEQ ID NO: 22735 - protein, 5 aa, Homo sapiens
WTTSR

SEQ ID NO: 22736 - protein, 5 aa, Homo sapiens
RLTDT

SEQ ID NO: 22737 - protein, 5 aa, Homo sapiens
SGRGR

SEQ ID NO: 22738 - protein, 5 aa, Homo sapiens
TDADN

SEQ ID NO: 22739 - protein, 5 aa, Homo sapiens
GAGSE

SEQ ID NO: 22740 - protein, 5 aa, Homo sapiens
EQSHH

SEQ ID NO: 22741 - protein, 5 aa, Homo sapiens
KKLKD

SEQ ID NO: 22742 - protein, 5 aa, Homo sapiens
GSQTV

SEQ ID NO: 22743 - protein, 5 aa, Homo sapiens
GSGCH

SEQ ID NO: 22744 - protein, 5 aa, Homo sapiens
IEEVD

SEQ ID NO: 22745 - protein, 5 aa, Homo sapiens
DWWGN

SEQ ID NO: 22746 - protein, 5 aa, Homo sapiens
RTGGK

SEQ ID NO: 22747 - protein, 5 aa, Homo sapiens
EALPH

SEQ ID NO: 22748 - protein, 5 aa, Homo sapiens
SFAEA

SEQ ID NO: 22749 - protein, 5 aa, Homo sapiens
CAWPL

SEQ ID NO: 22750 - protein, 5 aa, Homo sapiens
VKWMS

SEQ ID NO: 22751 - protein, 5 aa, Homo sapiens
PGDQP

SEQ ID NO: 22752 - protein, 5 aa, Homo sapiens
KLQLL

SEQ ID NO: 22753 - protein, 5 aa, Homo sapiens
TSASQ

SEQ ID NO: 22754 - protein, 5 aa, Homo sapiens
IKGKV

SEQ ID NO: 22755 - protein, 5 aa, Homo sapiens
DDWES

SEQ ID NO: 22756 - protein, 5 aa, Homo sapiens
QEADA

SEQ ID NO: 22757 - protein, 5 aa, Homo sapiens
EDADD

SEQ ID NO: 22758 - protein, 5 aa, Homo sapiens
GPTRV

SEQ ID NO: 22759 - protein, 5 aa, Homo sapiens
SNSPT

SEQ ID NO: 22760 - protein, 5 aa, Homo sapiens
ARARI

SEQ ID NO: 22761 - protein, 5 aa, Homo sapiens
PGVLT

SEQ ID NO: 22762 - protein, 5 aa, Homo sapiens
RVGLN

SEQ ID NO: 22763 - protein, 5 aa, Homo sapiens
RSFQP

SEQ ID NO: 22764 - protein, 5 aa, Homo sapiens
PPPVY

SEQ ID NO: 22765 - protein, 5 aa, Homo sapiens
PPVNT

SEQ ID NO: 22766 - protein, 5 aa, Homo sapiens
LIDHF

SEQ ID NO: 22767 - protein, 5 aa, Homo sapiens
SPRKP

SEQ ID NO: 22768 - protein, 5 aa, Homo sapiens
AQRNS

SEQ ID NO: 22769 - protein, 5 aa, Homo sapiens
ILEKP

SEQ ID NO: 22770 - protein, 5 aa, Homo sapiens
VQAGL

SEQ ID NO: 22771 - protein, 5 aa, Homo sapiens
IEEVD

SEQ ID NO: 22772 - protein, 5 aa, Homo sapiens
KALLF

SEQ ID NO: 22773 - protein, 5 aa, Homo sapiens
YAVVV

SEQ ID NO: 22774 - protein, 5 aa, Homo sapiens
TLRKL

SEQ ID NO: 22775 - protein, 5 aa, Homo sapiens
YAVVV

SEQ ID NO: 22776 - protein, 5 aa, Homo sapiens
TPDVR

SEQ ID NO: 22777 - protein, 5 aa, Homo sapiens
FILWP

SEQ ID NO: 22778 - protein, 5 aa, Homo sapiens
VKTIR

SEQ ID NO: 22779 - protein, 5 aa, Homo sapiens
SSDLR

SEQ ID NO: 22780 - protein, 5 aa, Homo sapiens
KGKSP

SEQ ID NO: 22781 - protein, 5 aa, Homo sapiens
GLWSG

SEQ ID NO: 22782 - protein, 5 aa, Homo sapiens
SSDLR

SEQ ID NO: 22783 - protein, 5 aa, Homo sapiens
KGKSP

SEQ ID NO: 22784 - protein, 5 aa, Homo sapiens
DLSTN

SEQ ID NO: 22785 - protein, 5 aa, Homo sapiens
LILSS

SEQ ID NO: 22786 - protein, 5 aa, Homo sapiens
IYFEG

SEQ ID NO: 22787 - protein, 5 aa, Homo sapiens
EGEEY

SEQ ID NO: 22788 - protein, 5 aa, Homo sapiens
DSDLE

SEQ ID NO: 22789 - protein, 5 aa, Homo sapiens
VKTIR

SEQ ID NO: 22790 - protein, 5 aa, Homo sapiens
DSDLE

SEQ ID NO: 22791 - protein, 5 aa, Homo sapiens
DSDLE

SEQ ID NO: 22792 - protein, 5 aa, Homo sapiens
SSDLR

SEQ ID NO: 22793 - protein, 5 aa, Homo sapiens
GTLCR

SEQ ID NO: 22794 - protein, 5 aa, Homo sapiens
RPAAF

SEQ ID NO: 22795 - protein, 5 aa, Homo sapiens
GRSGI

SEQ ID NO: 22796 - protein, 5 aa, Homo sapiens
SRDRA

SEQ ID NO: 22797 - protein, 5 aa, Homo sapiens
MMTLE

SEQ ID NO: 22798 - protein, 5 aa, Homo sapiens
IFVFL

SEQ ID NO: 22799 - protein, 5 aa, Homo sapiens
DSDLE

SEQ ID NO: 22800 - protein, 5 aa, Homo sapiens
GSDSI

SEQ ID NO: 22801 - protein, 5 aa, Homo sapiens
AKKIV

SEQ ID NO: 22802 - protein, 5 aa, Homo sapiens
DSDLE

SEQ ID NO: 22803 - protein, 5 aa, Homo sapiens
KMDLL

SEQ ID NO: 22804 - protein, 5 aa, Homo sapiens
IKDEI

SEQ ID NO: 22805 - protein, 5 aa, Homo sapiens
TPKKD

SEQ ID NO: 22806 - protein, 5 aa, Homo sapiens
SSNLR

SEQ ID NO: 22807 - protein, 5 aa, Homo sapiens
DSDLE

SEQ ID NO: 22808 - protein, 5 aa, Homo sapiens
EEKEE

SEQ ID NO: 22809 - protein, 5 aa, Homo sapiens
LAGFY

SEQ ID NO: 22810 - protein, 5 aa, Homo sapiens
DSDLE

SEQ ID NO: 22811 - protein, 5 aa, Homo sapiens
VPNLQ

SEQ ID NO: 22812 - protein, 5 aa, Homo sapiens
SFNIL

SEQ ID NO: 22813 - protein, 5 aa, Homo sapiens
NSPHT

SEQ ID NO: 22814 - protein, 5 aa, Homo sapiens
APSIW

SEQ ID NO: 22815 - protein, 5 aa, Homo sapiens
AAFWA

SEQ ID NO: 22816 - protein, 5 aa, Homo sapiens
THTLP

SEQ ID NO: 22817 - protein, 5 aa, Homo sapiens
TCFLR

SEQ ID NO: 22818 - protein, 5 aa, Homo sapiens
CGFNL

SEQ ID NO: 22819 - protein, 5 aa, Homo sapiens
WRQRV

SEQ ID NO: 22820 - protein, 5 aa, Homo sapiens
FQTSA

SEQ ID NO: 22821 - protein, 5 aa, Homo sapiens
KMQEH

SEQ ID NO: 22822 - protein, 5 aa, Homo sapiens
PHTQT

SEQ ID NO: 22823 - protein, 5 aa, Homo sapiens
SLLDS

SEQ ID NO: 22824 - protein, 5 aa, Homo sapiens
AAFWA

SEQ ID NO: 22825 - protein, 5 aa, Homo sapiens
SKNSQ

SEQ ID NO: 22826 - protein, 5 aa, Homo sapiens
KKKKK

SEQ ID NO: 22827 - protein, 5 aa, Homo sapiens
MLKTP

SEQ ID NO: 22828 - protein, 5 aa, Homo sapiens
HASAP

SEQ ID NO: 22829 - protein, 5 aa, Homo sapiens
LSSAL

SEQ ID NO: 22830 - protein, 5 aa, Homo sapiens
EESEQ

SEQ ID NO: 22831 - protein, 5 aa, Homo sapiens
GGPPS

SEQ ID NO: 22832 - protein, 5 aa, Homo sapiens
STEGA

SEQ ID NO: 22833 - protein, 5 aa, Homo sapiens
NSKRQ

SEQ ID NO: 22834 - protein, 5 aa, Homo sapiens
YDCLL

SEQ ID NO: 22835 - protein, 5 aa, Homo sapiens
AEALK

SEQ ID NO: 22836 - protein, 5 aa, Homo sapiens
LEQQT

SEQ ID NO: 22837 - protein, 5 aa, Homo sapiens
ISACT

SEQ ID NO: 22838 - protein, 5 aa, Homo sapiens
IGAND

SEQ ID NO: 22839 - protein, 5 aa, Homo sapiens
PQAIL

SEQ ID NO: 22840 - protein, 5 aa, Homo sapiens
EGSTE

SEQ ID NO: 22841 - protein, 5 aa, Homo sapiens
AGGRR

SEQ ID NO: 22842 - protein, 5 aa, Homo sapiens
GMGTL

SEQ ID NO: 22843 - protein, 5 aa, Homo sapiens
QMRRP

SEQ ID NO: 22844 - protein, 5 aa, Homo sapiens
QNCQI

SEQ ID NO: 22845 - protein, 5 aa, Homo sapiens
KTRSY

SEQ ID NO: 22846 - protein, 5 aa, Homo sapiens
GWSHC

SEQ ID NO: 22847 - protein, 5 aa, Homo sapiens
IVYWS

SEQ ID NO: 22848 - protein, 5 aa, Homo sapiens
TRLHT

SEQ ID NO: 22849 - protein, 5 aa, Homo sapiens
RLRAL

SEQ ID NO: 22850 - protein, 5 aa, Homo sapiens
CVCIC

SEQ ID NO: 22851 - protein, 5 aa, Homo sapiens
AVTDV

SEQ ID NO: 22852 - protein, 5 aa, Homo sapiens
PHWHF

SEQ ID NO: 22853 - protein, 5 aa, Homo sapiens
KRLQS

SEQ ID NO: 22854 - protein, 5 aa, Homo sapiens
LIENK

SEQ ID NO: 22855 - protein, 5 aa, Homo sapiens
KLTFM

SEQ ID NO: 22856 - protein, 5 aa, Homo sapiens
LGDLA

SEQ ID NO: 22857 - protein, 5 aa, Homo sapiens
RSQLL

SEQ ID NO: 22858 - protein, 5 aa, Homo sapiens
SRLAC

SEQ ID NO: 22859 - protein, 5 aa, Homo sapiens
FSTDV

SEQ ID NO: 22860 - protein, 5 aa, Homo sapiens
LSLRS

SEQ ID NO: 22861 - protein, 5 aa, Homo sapiens
AGITS

SEQ ID NO: 22862 - protein, 5 aa, Homo sapiens
CVSLL

SEQ ID NO: 22863 - protein, 5 aa, Homo sapiens
SRPAC

SEQ ID NO: 22864 - protein, 5 aa, Homo sapiens
VPGAT

SEQ ID NO: 22865 - protein, 5 aa, Homo sapiens
SKERW

SEQ ID NO: 22866 - protein, 5 aa, Homo sapiens
REVAS

SEQ ID NO: 22867 - protein, 5 aa, Homo sapiens
RIQII

SEQ ID NO: 22868 - protein, 5 aa, Homo sapiens
FCKGI

SEQ ID NO: 22869 - protein, 5 aa, Homo sapiens
DFGES

SEQ ID NO: 22870 - protein, 5 aa, Homo sapiens
GFDRS

SEQ ID NO: 22871 - protein, 5 aa, Homo sapiens
RQPPQ

SEQ ID NO: 22872 - protein, 5 aa, Homo sapiens
KGQLV

SEQ ID NO: 22873 - protein, 5 aa, Homo sapiens
PLSGV

SEQ ID NO: 22874 - protein, 5 aa, Homo sapiens
IVSYN

SEQ ID NO: 22875 - protein, 5 aa, Homo sapiens
DNIWL

SEQ ID NO: 22876 - protein, 5 aa, Homo sapiens
SEAEM

SEQ ID NO: 22877 - protein, 5 aa, Homo sapiens
PQMSS

SEQ ID NO: 22878 - protein, 5 aa, Homo sapiens
GDSPC

SEQ ID NO: 22879 - protein, 5 aa, Homo sapiens
TAQYH

SEQ ID NO: 22880 - protein, 5 aa, Homo sapiens
HQPQG

SEQ ID NO: 22881 - protein, 5 aa, Homo sapiens
SYGWQ

SEQ ID NO: 22882 - protein, 5 aa, Homo sapiens
FMPDY

SEQ ID NO: 22883 - protein, 5 aa, Homo sapiens
SSSET

SEQ ID NO: 22884 - protein, 5 aa, Homo sapiens
NNLQQ

SEQ ID NO: 22885 - protein, 5 aa, Homo sapiens
QPGPL

SEQ ID NO: 22886 - protein, 5 aa, Homo sapiens
SPTAS

SEQ ID NO: 22887 - protein, 5 aa, Homo sapiens
RLREG

SEQ ID NO: 22888 - protein, 5 aa, Homo sapiens
NSVPV

SEQ ID NO: 22889 - protein, 5 aa, Homo sapiens
IDFNS

SEQ ID NO: 22890 - protein, 5 aa, Homo sapiens
SGRRF

SEQ ID NO: 22891 - protein, 5 aa, Homo sapiens
RPHGL

SEQ ID NO: 22892 - protein, 5 aa, Homo sapiens
SKPRN

SEQ ID NO: 22893 - protein, 5 aa, Homo sapiens
SYTLV

SEQ ID NO: 22894 - protein, 5 aa, Homo sapiens
ETHPL

SEQ ID NO: 22895 - protein, 5 aa, Homo sapiens
ASLTR

SEQ ID NO: 22896 - protein, 5 aa, Homo sapiens
NDIPY

SEQ ID NO: 22897 - protein, 5 aa, Homo sapiens
ISARC

SEQ ID NO: 22898 - protein, 5 aa, Homo sapiens
FNSRL

SEQ ID NO: 22899 - protein, 5 aa, Homo sapiens
TTRTG

SEQ ID NO: 22900 - protein, 5 aa, Homo sapiens
AIKER

SEQ ID NO: 22901 - protein, 5 aa, Homo sapiens
PCWPG

SEQ ID NO: 22902 - protein, 5 aa, Homo sapiens
LTVSE

SEQ ID NO: 22903 - protein, 5 aa, Homo sapiens
KRERR

SEQ ID NO: 22904 - protein, 5 aa, Homo sapiens
ALNTV

SEQ ID NO: 22905 - protein, 5 aa, Homo sapiens
IQRRD

SEQ ID NO: 22906 - protein, 5 aa, Homo sapiens
IYSHR

SEQ ID NO: 22907 - protein, 5 aa, Homo sapiens
PCGLP

SEQ ID NO: 22908 - protein, 5 aa, Homo sapiens
NKAER

SEQ ID NO: 22909 - protein, 5 aa, Homo sapiens
TPETP

SEQ ID NO: 22910 - protein, 5 aa, Homo sapiens
QVRSR

SEQ ID NO: 22911 - protein, 5 aa, Homo sapiens
PGADA

SEQ ID NO: 22912 - protein, 5 aa, Homo sapiens
TGCUG

SEQ ID NO: 22913 - protein, 5 aa, Homo sapiens
TVVPL

SEQ ID NO: 22914 - protein, 5 aa, Homo sapiens
CNKSL

SEQ ID NO: 22915 - protein, 5 aa, Homo sapiens
GALGQ

SEQ ID NO: 22916 - protein, 5 aa, Homo sapiens
LTNWE

SEQ ID NO: 22917 - protein, 5 aa, Homo sapiens
RGQEF

SEQ ID NO: 22918 - protein, 5 aa, Homo sapiens
REKLH

SEQ ID NO: 22919 - protein, 5 aa, Homo sapiens
GTDES

SEQ ID NO: 22920 - protein, 5 aa, Homo sapiens
LTVSE

SEQ ID NO: 22921 - protein, 5 aa, Homo sapiens
PCWPG

SEQ ID NO: 22922 - protein, 5 aa, Homo sapiens
AIKER

SEQ ID NO: 22923 - protein, 5 aa, Homo sapiens
HKDKS

SEQ ID NO: 22924 - protein, 5 aa, Homo sapiens
VMSQV

SEQ ID NO: 22925 - protein, 5 aa, Homo sapiens
SYSHI

SEQ ID NO: 22926 - protein, 5 aa, Homo sapiens
SELYI

SEQ ID NO: 22927 - protein, 5 aa, Homo sapiens
QHESL

SEQ ID NO: 22928 - protein, 5 aa, Homo sapiens
ASSTY

SEQ ID NO: 22929 - protein, 5 aa, Homo sapiens
PDVTI

SEQ ID NO: 22930 - protein, 5 aa, Homo sapiens
SLAPS

SEQ ID NO: 22931 - protein, 5 aa, Homo sapiens
AIKER

SEQ ID NO: 22932 - protein, 5 aa, Homo sapiens
AQPPK

SEQ ID NO: 22933 - protein, 5 aa, Homo sapiens
SSLMG

SEQ ID NO: 22934 - protein, 5 aa, Homo sapiens
STVIL

SEQ ID NO: 22935 - protein, 5 aa, Homo sapiens
PLDQS

SEQ ID NO: 22936 - protein, 5 aa, Homo sapiens
RRRLQ

SEQ ID NO: 22937 - protein, 5 aa, Homo sapiens
DITLT

SEQ ID NO: 22938 - protein, 5 aa, Homo sapiens
RGAKL

SEQ ID NO: 22939 - protein, 5 aa, Homo sapiens
TNRIQ

SEQ ID NO: 22940 - protein, 5 aa, Homo sapiens
VKSGV

SEQ ID NO: 22941 - protein, 5 aa, Homo sapiens
KEPRA

SEQ ID NO: 22942 - protein, 5 aa, Homo sapiens
GRRIT

SEQ ID NO: 22943 - protein, 5 aa, Homo sapiens
LIYSA

SEQ ID NO: 22944 - protein, 5 aa, Homo sapiens
PQSAL

SEQ ID NO: 22945 - protein, 5 aa, Homo sapiens
LAEYS

SEQ ID NO: 22946 - protein, 5 aa, Homo sapiens
ERKRE

SEQ ID NO: 22947 - protein, 5 aa, Homo sapiens
LLGLI

SEQ ID NO: 22948 - protein, 5 aa, Homo sapiens
HFKTW

SEQ ID NO: 22949 - protein, 5 aa, Homo sapiens
ILEKH

SEQ ID NO: 22950 - protein, 5 aa, Homo sapiens
IRKQR

SEQ ID NO: 22951 - protein, 5 aa, Homo sapiens
VRASP

SEQ ID NO: 22952 - protein, 5 aa, Homo sapiens
FSLSS

SEQ ID NO: 22953 - protein, 5 aa, Homo sapiens
THIHT

SEQ ID NO: 22954 - protein, 5 aa, Homo sapiens
PLQFY

SEQ ID NO: 22955 - protein, 5 aa, Homo sapiens
RSSLP

SEQ ID NO: 22956 - protein, 5 aa, Homo sapiens
QTCRD

SEQ ID NO: 22957 - protein, 5 aa, Homo sapiens
CLPAW

SEQ ID NO: 22958 - protein, 5 aa, Homo sapiens
PLQYF

SEQ ID NO: 22959 - protein, 5 aa, Homo sapiens
HQRLY

SEQ ID NO: 22960 - protein, 5 aa, Homo sapiens
EQPRA

SEQ ID NO: 22961 - protein, 5 aa, Homo sapiens
KIVYL

SEQ ID NO: 22962 - protein, 5 aa, Homo sapiens
PQTRV

SEQ ID NO: 22963 - protein, 5 aa, Homo sapiens
KKSSD

SEQ ID NO: 22964 - protein, 5 aa, Homo sapiens
ISIGE

SEQ ID NO: 22965 - protein, 5 aa, Homo sapiens
ISTDV

SEQ ID NO: 22966 - protein, 5 aa, Homo sapiens
RPPHS

SEQ ID NO: 22967 - protein, 5 aa, Homo sapiens
GLRGR

SEQ ID NO: 22968 - protein, 5 aa, Homo sapiens
KQCIS

SEQ ID NO: 22969 - protein, 5 aa, Homo sapiens
KKSSD

SEQ ID NO: 22970 - protein, 5 aa, Homo sapiens
FPPGF

SEQ ID NO: 22971 - protein, 5 aa, Homo sapiens
MSMIK

SEQ ID NO: 22972 - protein, 5 aa, Homo sapiens
QEEMM

SEQ ID NO: 22973 - protein, 5 aa, Homo sapiens
IPDVR

SEQ ID NO: 22974 - protein, 5 aa, Homo sapiens
DVAHS

SEQ ID NO: 22975 - protein, 5 aa, Homo sapiens
EALRF

SEQ ID NO: 22976 - protein, 5 aa, Homo sapiens
PDNMK

SEQ ID NO: 22977 - protein, 5 aa, Homo sapiens
CCVIS

SEQ ID NO: 22978 - protein, 5 aa, Homo sapiens
FAGVA

SEQ ID NO: 22979 - protein, 5 aa, Homo sapiens
LSPGS

SEQ ID NO: 22980 - protein, 5 aa, Homo sapiens
LPSLC

SEQ ID NO: 22981 - protein, 5 aa, Homo sapiens
METSP

SEQ ID NO: 22982 - protein, 5 aa, Homo sapiens
KDWKD

SEQ ID NO: 22983 - protein, 5 aa, Homo sapiens
AESPF

SEQ ID NO: 22984 - protein, 5 aa, Homo sapiens
ITTGY

SEQ ID NO: 22985 - protein, 5 aa, Homo sapiens
NKGSK

SEQ ID NO: 22986 - protein, 5 aa, Homo sapiens
SCSRC

SEQ ID NO: 22987 - protein, 5 aa, Homo sapiens
PRRRR

SEQ ID NO: 22988 - protein, 5 aa, Homo sapiens
AQTRL

SEQ ID NO: 22989 - protein, 5 aa, Homo sapiens
LAGYQ

SEQ ID NO: 22990 - protein, 5 aa, Homo sapiens
YSQFS

SEQ ID NO: 22991 - protein, 5 aa, Homo sapiens
HLASE

SEQ ID NO: 22992 - protein, 5 aa, Homo sapiens
SYLGG

SEQ ID NO: 22993 - protein, 5 aa, Homo sapiens
FYLTP

SEQ ID NO: 22994 - protein, 5 aa, Homo sapiens
RRRWT

SEQ ID NO: 22995 - protein, 5 aa, Homo sapiens
GCCNT

SEQ ID NO: 22996 - protein, 5 aa, Homo sapiens
KKKKK

SEQ ID NO: 22997 - protein, 5 aa, Homo sapiens
FVGSL

SEQ ID NO: 22998 - protein, 5 aa, Homo sapiens
RLWFA

SEQ ID NO: 22999 - protein, 5 aa, Homo sapiens
LPSQA

SEQ ID NO: 23000 - protein, 5 aa, Homo sapiens
GELWK

SEQ ID NO: 23001 - protein, 5 aa, Homo sapiens
QILLM

SEQ ID NO: 23002 - protein, 5 aa, Homo sapiens
TAKKD

SEQ ID NO: 23003 - protein, 5 aa, Homo sapiens
KKVTP

SEQ ID NO: 23004 - protein, 5 aa, Homo sapiens
LKVQV

SEQ ID NO: 23005 - protein, 5 aa, Homo sapiens
LLAMK

SEQ ID NO: 23006 - protein, 5 aa, Homo sapiens
DPTVS

SEQ ID NO: 23007 - protein, 5 aa, Homo sapiens
PAAEA

SEQ ID NO: 23008 - protein, 5 aa, Homo sapiens
LGRDT

SEQ ID NO: 23009 - protein, 5 aa, Homo sapiens
TLKSK

SEQ ID NO: 23010 - protein, 5 aa, Homo sapiens
SPVQA

SEQ ID NO: 23011 - protein, 5 aa, Homo sapiens
GTWDF

SEQ ID NO: 23012 - protein, 5 aa, Homo sapiens
GFFST

SEQ ID NO: 23013 - protein, 5 aa, Homo sapiens
ESPER

SEQ ID NO: 23014 - protein, 5 aa, Homo sapiens
LAGYQ

SEQ ID NO: 23015 - protein, 5 aa, Homo sapiens
AQTRL

SEQ ID NO: 23016 - protein, 5 aa, Homo sapiens
YLRGK

SEQ ID NO: 23017 - protein, 5 aa, Homo sapiens
SRHRR

SEQ ID NO: 23018 - protein, 5 aa, Homo sapiens
FHLSY

SEQ ID NO: 23019 - protein, 5 aa, Homo sapiens
PAEPN

SEQ ID NO: 23020 - protein, 5 aa, Homo sapiens
VEVKF

SEQ ID NO: 23021 - protein, 5 aa, Homo sapiens
HLASE

SEQ ID NO: 23022 - protein, 5 aa, Homo sapiens
FPPGF

SEQ ID NO: 23023 - protein, 5 aa, Homo sapiens
VVQYH

SEQ ID NO: 23024 - protein, 5 aa, Homo sapiens
FVDIM

SEQ ID NO: 23025 - protein, 5 aa, Homo sapiens
GRPDS

SEQ ID NO: 23026 - protein, 5 aa, Homo sapiens
GSIPT

SEQ ID NO: 23027 - protein, 5 aa, Homo sapiens
AVSWQ

SEQ ID NO: 23028 - protein, 5 aa, Homo sapiens
EEWVL

SEQ ID NO: 23029 - protein, 5 aa, Homo sapiens
EVSYA

SEQ ID NO: 23030 - protein, 5 aa, Homo sapiens
LKMLS

SEQ ID NO: 23031 - protein, 5 aa, Homo sapiens
LCKTR

SEQ ID NO: 23032 - protein, 5 aa, Homo sapiens
WKLWR

SEQ ID NO: 23033 - protein, 5 aa, Homo sapiens
KLNTQ

SEQ ID NO: 23034 - protein, 5 aa, Homo sapiens
PAAGI

SEQ ID NO: 23035 - protein, 5 aa, Homo sapiens
EQRGR

SEQ ID NO: 23036 - protein, 5 aa, Homo sapiens
PAAGI

SEQ ID NO: 23037 - protein, 5 aa, Homo sapiens
DNDIM

SEQ ID NO: 23038 - protein, 5 aa, Homo sapiens
SPSYT

SEQ ID NO: 23039 - protein, 5 aa, Homo sapiens
SFLMS

SEQ ID NO: 23040 - protein, 5 aa, Homo sapiens
DDTAL

SEQ ID NO: 23041 - protein, 5 aa, Homo sapiens
KDVIL

SEQ ID NO: 23042 - protein, 5 aa, Homo sapiens
QGKSM

SEQ ID NO: 23043 - protein, 5 aa, Homo sapiens
GTFNF

SEQ ID NO: 23044 - protein, 5 aa, Homo sapiens
SQDGA

SEQ ID NO: 23045 - protein, 5 aa, Homo sapiens
TDTSV

SEQ ID NO: 23046 - protein, 5 aa, Homo sapiens
AVLSD

SEQ ID NO: 23047 - protein, 5 aa, Homo sapiens
IFQDF

SEQ ID NO: 23048 - protein, 5 aa, Homo sapiens
RPAKV

SEQ ID NO: 23049 - protein, 5 aa, Homo sapiens
ENCCL

SEQ ID NO: 23050 - protein, 5 aa, Homo sapiens
HSTEV

SEQ ID NO: 23051 - protein, 5 aa, Homo sapiens
ISVGL

SEQ ID NO: 23052 - protein, 5 aa, Homo sapiens
DKEGA

SEQ ID NO: 23053 - protein, 5 aa, Homo sapiens
EECIR

SEQ ID NO: 23054 - protein, 5 aa, Homo sapiens
RARAP

SEQ ID NO: 23055 - protein, 5 aa, Homo sapiens
SAVHL

SEQ ID NO: 23056 - protein, 5 aa, Homo sapiens
NSFRY

SEQ ID NO: 23057 - protein, 5 aa, Homo sapiens
IISDF

SEQ ID NO: 23058 - protein, 5 aa, Homo sapiens
TFQRA

SEQ ID NO: 23059 - protein, 5 aa, Homo sapiens
EDRRQ

SEQ ID NO: 23060 - protein, 5 aa, Homo sapiens
LVFVF

SEQ ID NO: 23061 - protein, 5 aa, Homo sapiens
KSREP

SEQ ID NO: 23062 - protein, 5 aa, Homo sapiens
NCLPP

SEQ ID NO: 23063 - protein, 5 aa, Homo sapiens
PRPRF

SEQ ID NO: 23064 - protein, 5 aa, Homo sapiens
SRYQK

SEQ ID NO: 23065 - protein, 5 aa, Homo sapiens
GDTLW

SEQ ID NO: 23066 - protein, 5 aa, Homo sapiens
NKHWY

SEQ ID NO: 23067 - protein, 5 aa, Homo sapiens
KDAFS

SEQ ID NO: 23068 - protein, 5 aa, Homo sapiens
LLPER

SEQ ID NO: 23069 - protein, 5 aa, Homo sapiens
RSHIG

SEQ ID NO: 23070 - protein, 5 aa, Homo sapiens
MKKHQ

SEQ ID NO: 23071 - protein, 5 aa, Homo sapiens
SHHAQ

SEQ ID NO: 23072 - protein, 5 aa, Homo sapiens
KLALE

SEQ ID NO: 23073 - protein, 5 aa, Homo sapiens
FTGEY

SEQ ID NO: 23074 - protein, 5 aa, Homo sapiens
PTPPP

SEQ ID NO: 23075 - protein, 5 aa, Homo sapiens
WLPFL

SEQ ID NO: 23076 - protein, 5 aa, Homo sapiens
ILLIK

SEQ ID NO: 23077 - protein, 5 aa, Homo sapiens
LICTW

SEQ ID NO: 23078 - protein, 5 aa, Homo sapiens
TGMSH

SEQ ID NO: 23079 - protein, 5 aa, Homo sapiens
RTQPG

SEQ ID NO: 23080 - protein, 5 aa, Homo sapiens
VAKQI

SEQ ID NO: 23081 - protein, 5 aa, Homo sapiens
GFCGG

SEQ ID NO: 23082 - protein, 5 aa, Homo sapiens
PTWTT

SEQ ID NO: 23083 - protein, 5 aa, Homo sapiens
ALGSG

SEQ ID NO: 23084 - protein, 5 aa, Homo sapiens
ALPLS

SEQ ID NO: 23085 - protein, 5 aa, Homo sapiens
AVATT

SEQ ID NO: 23086 - protein, 5 aa, Homo sapiens
PASAS

SEQ ID NO: 23087 - protein, 5 aa, Homo sapiens
LLLFI

SEQ ID NO: 23088 - protein, 5 aa, Homo sapiens
TGVSH

SEQ ID NO: 23089 - protein, 5 aa, Homo sapiens
ANIVS

SEQ ID NO: 23090 - protein, 5 aa, Homo sapiens
DGPVP

SEQ ID NO: 23091 - protein, 5 aa, Homo sapiens
DYRHK

SEQ ID NO: 23092 - protein, 5 aa, Homo sapiens
ISACT

SEQ ID NO: 23093 - protein, 5 aa, Homo sapiens
PQPSE

SEQ ID NO: 23094 - protein, 5 aa, Homo sapiens
PQPPE

SEQ ID NO: 23095 - protein, 5 aa, Homo sapiens
AQEDP

SEQ ID NO: 23096 - protein, 5 aa, Homo sapiens
EDTEM

SEQ ID NO: 23097 - protein, 5 aa, Homo sapiens
EDTEM

SEQ ID NO: 23098 - protein, 5 aa, Homo sapiens
AQRDK

SEQ ID NO: 23099 - protein, 5 aa, Homo sapiens
AQEDP

SEQ ID NO: 23100 - protein, 5 aa, Homo sapiens
SFTED

SEQ ID NO: 23101 - protein, 5 aa, Homo sapiens
SAGGA

SEQ ID NO: 23102 - protein, 5 aa, Homo sapiens
SVCFL

SEQ ID NO: 23103 - protein, 5 aa, Homo sapiens
YRHPP

SEQ ID NO: 23104 - protein, 5 aa, Homo sapiens
PCLLK

SEQ ID NO: 23105 - protein, 5 aa, Homo sapiens
SYFLF

SEQ ID NO: 23106 - protein, 5 aa, Homo sapiens
SRLTA

SEQ ID NO: 23107 - protein, 5 aa, Homo sapiens
RTHTG

SEQ ID NO: 23108 - protein, 5 aa, Homo sapiens
YRVHL

SEQ ID NO: 23109 - protein, 5 aa, Homo sapiens
LPGAI

SEQ ID NO: 23110 - protein, 5 aa, Homo sapiens
KSKSL

SEQ ID NO: 23111 - protein, 5 aa, Homo sapiens
IPLNL

SEQ ID NO: 23112 - protein, 5 aa, Homo sapiens
LLPHP

SEQ ID NO: 23113 - protein, 5 aa, Homo sapiens
QKELA

SEQ ID NO: 23114 - protein, 5 aa, Homo sapiens
VDGCR

SEQ ID NO: 23115 - protein, 5 aa, Homo sapiens
ALAQG

SEQ ID NO: 23116 - protein, 5 aa, Homo sapiens
GLPKC

SEQ ID NO: 23117 - protein, 5 aa, Homo sapiens
TAQSS

SEQ ID NO: 23118 - protein, 5 aa, Homo sapiens
ECPAS

SEQ ID NO: 23119 - protein, 5 aa, Homo sapiens
TAKKD

SEQ ID NO: 23120 - protein, 5 aa, Homo sapiens
PVFKT

SEQ ID NO: 23121 - protein, 5 aa, Homo sapiens
LEGSL

SEQ ID NO: 23122 - protein, 5 aa, Homo sapiens
KGNLI

SEQ ID NO: 23123 - protein, 5 aa, Homo sapiens
EDKDD

SEQ ID NO: 23124 - protein, 5 aa, Homo sapiens
LDQLQ

SEQ ID NO: 23125 - protein, 5 aa, Homo sapiens
GCWLQ

SEQ ID NO: 23126 - protein, 5 aa, Homo sapiens
FEMES

SEQ ID NO: 23127 - protein, 5 aa, Homo sapiens
SHHAQ
